(19) United States
(12) Patent Application Publication
(10) Pub. No.: US 2009/0215709 A1
(43) Pub. Date: Aug. 27, 2009

(54) Methylation markers for diagnosis and treatment of cancers

(75) Inventors: Wim Van Criekinge, Sart-Tilman (Liege) (BE); Josef Straub, Sart-Tilman (Liege) (BE); David Sidransky, Baltimore, MD (US)

Correspondence Address: BANNER & WITCOFF, LTD., 1100 13th STREET, N.W., SUITE 1200, WASHINGTON, DC, 20005-4051, US

(73) Assignees: Johns Hopkins University, Baltimore, MD (US); OncoMethylome Sciences, S.A., Sart-Tilman (Liege) (BE)

(21) Appl. No.: 11/580,245

(22) Filed: Oct. 13, 2006

Related U.S. Application Data
(63) Continuation-in-part of application No. PCT/US06/14493, filed on Apr. 17, 2006.
(60) Provisional application No. 60/671,501, filed on Apr. 15, 2005.

(51) Int. Cl. A61K 31/704; C12Q 1/68; C12N 5/02; A61K 31/7088

(52) U.S. Cl. 514/34; 435/6; 435/375; 514/44

(57) ABSTRACT

Two hundred ten markers are provided which are epigenetically silenced in one or more cancer types. The markers can be used diagnostically, prognostically, therapeutically, and for selecting treatments that are well tailored for an individual patient. Restoration of expression of silenced genes can be useful therapeutically, for example, if the silenced gene is a tumor-suppressor gene. Restoration can be accomplished by supplying non-methylated copies of the silenced genes or polynucleotides encoding their encoded products. Alternatively, restoration can be accomplished using chemical demethylating agents or methylation inhibitors. Kits for testing for epigenetic silencing can be used in the context of diagnostics, prognostics, or for selecting “personalized medicine” treatments.

[0001] This application claims the benefit of U.S. provisional application Ser. No. 60/671,501, filed Apr. 15, 2005 and PCT application number PCT/US2006/01449, filed Apr. 17, 2006. The disclosures of these applications including the data submitted on CD-ROMs are incorporated herein by reference.

[0002] This application incorporates by reference the contents of each of two duplicate CD-ROMs. Each CD-ROM contains an identical 1,720 kB file labeled “882832_{—}1.txt” and containing the sequence listing for this application. Each CD-ROM also contains an identical 230 kB file labeled “882734_{—b 1.}txt” containing TABLE 9; an identical 33 kB file labeled “882733_{—}1.txt” containing TABLE 10; an identical 481 kB file labeled “882729_{—}1” containing TABLE 11; an identical 450 kB file labeled “882730_{—}1.txt” containing TABLE 12; an identical 2,458 kB file labeled “882732.txt” containing TABLE 13; and an identical 547 kB file labeled “882731_{—}1.txt” containing TABLE 14. The CD-ROMs were created on Apr. 11, 2006 and submitted with PCT/US2006/01449.

LENGTHY TABLES
The patent application contains a lengthy table section. A copy of the table is available in electronic form from the USPTO web site (http://seqdata.uspto.gov/?pageRequest=docDetail&DocID=US20090215709A1). An electronic copy of the table will also be available from the USPTO upon request and payment of the fee set forth in 37 CFR 1.19(b)(3).

### TECHNICAL FIELD OF THE INVENTION

[0003] This invention is related to the area of cancer diagnostics and therapeutics. In particular, it relates to aberrant methylation patterns of particular genes in cancers.

### BACKGROUND OF THE INVENTION

### DNA Methylation and its Role in Carcinogenesis

[0004] The information to make the cells of all living organisms is contained in their DNA. DNA is made up of a unique sequence of four bases: adenine (A), guanine (G), thymine (T) and cytosine (C). These bases are paired A to T and G to C on the two strands that form the DNA double helix. Strands of these pairs store information to make specific molecules grouped into regions called genes. Within each cell, there are processes that control what gene is turned on, or expressed, thus defining the unique function of the cell. One of these control mechanisms is provided by adding a methyl group onto cytosine (C). The methyl group tagged C can be written as mC.

[0005] DNA methylation plays an important role in determining whether some genes are expressed or not. By turning genes off that are not needed, DNA methylation is an essential control mechanism for the normal development and functioning of organisms. Alternatively, abnormal DNA methylation is one of the mechanisms underlying the changes observed with aging and development of many cancers.

[0006] Cancers have historically been linked to genetic changes caused by chromosomal mutations within the DNA. Mutations, hereditary or acquired, can lead to the loss of expression of genes critical for maintaining a healthy state. Evidence now supports that a relatively large number of cancers originate, not from mutations, but from inappropriate DNA methylation. In many cases, hyper-methylation of DNA incorrectly switches off critical genes, such as tumor suppressor genes or DNA repair genes, allowing cancers to develop and progress. This non-mutational process for controlling gene expression is described as epigenetics.

[0007] DNA methylation is a chemical modification of DNA performed by enzymes called methyltransferases, in which a methyl group (m) is added to certain cytosines (C) of DNA. This non-mutational (epigenetic) process (mC) is a critical factor in gene expression regulation. See, J. G. Herman, Seminars in Cancer Biology, 9: 359-67, 1999.

[0008] Although the phenomenon of gene methylation has attracted the attention of cancer researchers for some time, its true role in the progression of human cancers is just now being recognized. In normal cells, methylation occurs predominantly in regions of DNA that have few CG base repeats, while CpG islands, regions of DNA that have long repeats of CG bases, remain non-methylated. Gene promoter regions that control protein expression are often CpG island-rich. Aberrant methylation of these normally non-methylated CpG islands in the promoter region causes transcriptional inactivation or silencing of certain tumor suppressor expression in human cancers.

[0009] Genes that are hypermethylated in tumor cells are strongly specific to the tissue of origin of the tumor. Molecular signatures of cancers of all types can be used to improve cancer detection, the assessment of cancer risk and response to therapy. Promoter hypermethylation events provide some of the most promising markers for such purposes.

### Promoter Gene Hypermethylation: Promising Tumor Markers

[0010] Information regarding the hypermethylation of specific promoter genes can be beneficial to diagnosis, prognosis, and treatment of various cancers. Methylation of specific gene promoter regions can occur early and often in carcinogenesis making these markers ideal targets for cancer diagnostics.

[0011] Methylation patterns are tumor specific. Positive signals are always found in the same location of a gene. Real time PCR-based methods are highly sensitive, quantitative, and suitable for clinical use. DNA is stable and is found intact in readily available fluids (e.g., serum, sputum, stool and urine) and paraffin embedded tissues. Panels of pertinent gene markers may cover most human cancers.

### Diagnosis

[0012] Key to improving the clinical outcome in patients with cancer is diagnosis at its earliest stage, while it is still localized and readily treatable. The characteristics noted above provide the means for a more accurate screening and surveillance program by identifying higher-risk patients on a molecular basis. It could also provide justification-for more definitive follow up of patients who have molecular but not yet all the pathological or clinical features associated with malignancy.

### Predicting Treatment Response

[0013] Information about how a cancer develops through molecular events could allow a clinician to predict more accurately how such a cancer is likely to respond to specific chemotherapeutic agents. In this way, a regimen based on knowledge of the tumor's chemosensitivity could be rationally designed. Studies have shown that hypermethylation of the MGMT promoter in glioma patients is indicative of a good response to therapy, greater overall survival and a longer time to progression.

[0014] There is a continuing need in the art for new diagnostic markers and therapeutic targets for cancer to improve management of patient care.

### SUMMARY OF THE INVENTION

[0015] According to a first embodiment of the invention a method is provided for identifying a cell as neoplastic or predisposed to neoplasia. Epigenetic silencing of at least one gene listed in Table 5 is detected in a test cell. The test cell is identified as neoplastic or predisposed to neoplasia based on the detection of epigenetic silencing.

[0016] In another embodiment of the invention a method is provided for reducing or inhibiting neoplastic growth of a cell which exhibits epigenetic silenced transcription of at least one gene associated with a cancer. The cell may be a cervical, prostate, lung, breast, or colon cell. Expression of a polypeptide encoded by the epigenetic silenced gene is restored in the cell by contacting the cell with a CpG dinucleotide demethylating agent or with an agent that changes the histone acetylation status of cellular DNA or any other treatment affecting epigenetic mechanisms present in cells. The gene is selected from those listed in Table 5. Unregulated growth of the cell is thereby reduced or inhibited. If the cell is a breast or lung cell, the gene may or may not be APC. Expression of the gene is tested in the cell to monitor response to the demethylating or other epigenetic affecting agent.

[0017] Another aspect of the invention is a method of reducing or inhibiting neoplastic growth of a cell which exhibits epigenetic silenced transcription of at least one gene associated with a cancer. The cell may be a cervical prostate, lung, breast, or colon cell. A polynucleotide encoding a polypeptide is introduced into a cell which exhibits epigenetic silenced transcription of at least one gene listed in Table 5. The polypeptide is encoded by the epigenetic-silenced gene. The polypeptide is thereby expressed in the cell thereby restoring expression of the polypeptide in the cell. If the cell is a breast or lung cell, the gene may or may not be APC.

[0018] Still another aspect of the invention is a method of treating a cancer patient. The cancer may be a cervical prostate, lung, breast, or colon cell. A demethylating agent is administered to the patient in sufficient amounts to restore expression of a tumor-associated methylation-silenced gene selected from those listed in Table 5 in the patient's tumor. If the cancer is a breast or lung cancer, the gene may or may not be APC. Expression of the gene is tested in cancer cells of the patient to monitor response to the demethylating agent.

[0019] An additional embodiment of the invention provides a method of treating a cancer patient. The cancer may be a cervical, prostate, lung, breast, or colon cancer. A polynucleotide encoding a polypeptide is administered to the patient. The polypeptide is encoded by a gene listed in Table 5. The polypeptide is expressed in the patient's tumor thereby restoring expression of the polypeptide in the tumor. If the cancer is a breast or lung cancer, the gene may or may not be APC.

[0020] Yet another embodiment of the invention is a method for selecting a therapeutic strategy for treating a cancer patient. A gene selected from those listed in Table 5 whose expression in cancer cells of the patient is reactivated by a demethylating agent is identified. A therapeutic agent which reactivates expression of the gene is selected for treating the cancer patient. If the cancer cells are breast or lung cells, the gene may or may not be APC.

[0021] A further embodiment of the invention is a kit for assessing methylation in a cell sample. The kit comprises certain components in a package. One component is a reagent that (a) modifies methylated cytosine residues but not non-methylated cytosine residues, or that (b) modifies non-methylated cytosine residues but not methylated cytosine residues. A second component is a pair of oligonucleotide primers that specifically hybridizes under amplification conditions to a region of a gene selected from those listed in Table 5. The region is within about 1 kb of said gene's transcription start site.

[0022] These and other embodiments which will be apparent to those of skill in the art upon reading the specification provide the art with tools and methods for detection, diagnosis, therapy, and drug selection pertaining to neoplastic cells and cancers.

### BRIEF DESCRIPTION OF THE FIGURES

[0023] FIG. 1A-1B: Methylation specific PCR (MSP) for CCNA1 (FIG. 1A) and NPTX1 (FIG. 1B)

[0024] FIG. 2: Methylation specific PCR (MSP) for CEBPC and PODXL

[0025] FIG. 3A-FIG. 3F: Differential methylation for colorectal cells of markers OSMR (FIG. 3A), B4GALT1 (FIG. 3B), PAPSS2 (FIG. 3C), TUBG2 (FIG. 3D), SFRP4 (FIG. 3E), and NTRK2 (FIG. 3F)

[0026] FIG. 4. Table 1. Squamous lung cancer reactivated genes

[0027] FIG. 5. Table 2. Adenocarcinoma lung cancer reactivated genes

[0028] FIG. 6. Table 3. All lung cancer reactivated genes

[0029] FIG. 7. Table 4. Prostate cancer reactivated genes

[0030] FIG. 8A-8E. Table 5. All cancer reactivated genes

[0031] FIG. 9. Table 6. Breast cancer reactivated genes

[0032] FIG. 10A-10B. Table 7. Colorectal cancer reactivated genes

[0033] FIG. 11. Table 8. Cervical cancer reactivated genes

[0034] FIG. 12A-12D. Table 15. Correlation of transcript sequence to encoded protein sequence; also provides the order that the genes and proteins are listed in the sequence listing.

[0035] FIG. 13A-13B. Table 16. BSP results for cervical cancer tissues.

[0036] FIG. 14A-14R. Table 17. Correlation of transcript accession number to gene/protein name

[0037] FIG. 15. Table 18. Results for lung cancer tissues.

[0038] FIG. 16A-16B. Table 19. Results for breast cancer tissues

[0039] FIG. 17. Table 20. Results for colon cancer tissues.

[0040] FIG. 18. Table 21. Primers used for CMSP and OMSP for colon cells.

[0041] FIG. 19A-19B. Table 22. Primers used for various cancer types.

[0042] FIG. 20. Table 23. Methylation results in various cancer types

[0043] FIG. 21A-21C. FIG. 21A shows methylation data for OSMR in 100 pairs of colon tumor and normal cells. FIG. 21B shows B4GALT1 methylation in a variety of indicated tumor/normal pairs. FIG. 21C shows B4GALT1 methylation in additional tumor/normal pairs.

### BRIEF DESCRIPTION OF THE TABLES ON CD-R

[0044] Table 9. Combinations of two and three squamous lung cancer reactivated genes (on CD.)

[0045] Table 10. Combinations of two and three adenocarcinoma lung cancer reactivated genes (on CD)

[0046] Table 11. Combinations of two and three prostate cancer reactivated genes (on CD)

[0047] Table 12. Combinations of two and three breast cancer reactivated genes (on CD)

[0048] Table 13. Combinations of two and three colorectal cancer reactivated genes (on CD)

[0049] Table 14. Combinations of two and three cervical cancer reactivated genes (on CD)

### DETAILED DESCRIPTION OF THE INVENTION

[0050] The inventors have discovered a set of genes whose transcription is epigenetically silenced in cancers. All of the identified genes are shown in Table 5. Subsets which are associated with particular cancers are shown in Tables 1-4 and 6-8.

[0051] Epigenetic silencing of a gene can be determined by any method known in the art. One method is to determine that a gene which is expressed in normal cells is less expressed or not expressed in tumor cells. This method does not, on its own, however, indicate that the silencing is epigenetic, as the mechanism of the silencing could be genetic, for example, by somatic mutation. One method to determine that the silencing is epigenetic is to treat with a reagent, such as DAC (5′-deazacytidine), or with a reagent which changes the histone acetylation status of cellular DNA or any other treatment affecting epigenetic mechanisms present in cells, and observe that the silencing is reversed, i.e., that the expression of the gene is reactivated or restored. Another means to determine epigenetic silencing is to determine the presence of methylated CpG dinucleotide motifs in the silenced gene. Typically these reside near the transcription start site, for example, within about 1 kbp, within about 750 bp, or within about 500 bp.

[0052] Expression of a gene can be assessed using any means known in the art. Either mRNA or protein can be measured. Methods employing hybridization to nucleic acid probes can be employed for measuring specific mRNAs. Such methods include using nucleic acid probe arrays (microarray technology), in situ hybridization, and using Northern blots. Messenger RNA can also be assessed using amplification techniques, such as RT-PCR. Advances in genomic technologies now permit the simultaneous analysis of thousands of genes, although many are based on the same concept of specific probe-target hybridization. Sequencing-based methods are an alternative; these methods started with the use of expressed sequence tags (ESTs), and now include methods based on short tags, such as serial analysis of gene expression (SAGE) and massively parallel signature sequencing (MPSS). Differential display techniques provide yet another means of analyzing gene expression; this family of techniques is based on random amplification of cDNA fragments generated by restriction digestion, and bands that differ between two tissues identify cDNAs of interest. Specific proteins can be assessed using any convenient method including immunoassays and immuno-cytochemistry but are not limited to that. Most such methods will employ antibodies which are specific for the particular protein or protein fragments. The sequences of the mRNA (cDNA) and proteins of the markers of the present invention are provided in the sequence listing. The sequences are provided in the order of increasing accession numbers as shown in Table 15.

[0053] Methylation-sensitive restriction endonucleases can be used to detect methylated CpG dinucleotide motifs. Such endonucleases may either preferentially cleave methylated recognition sites relative to non-methylated recognition sites or preferentially cleave non-methylated relative to methylated recognition sites. Examples of the former are Acc III, Ban I, BstN I, Msp I, and Xma I. Examples of the latter are Acc II, Ava I, BssH II, BstU I, Hpa II, and Not I. Alternatively, chemical reagents can be used which selectively modify either the methylated or non-methylated form of CpG dinucleotide motifs.

[0054] Modified products can be detected directly, or after a further reaction which creates products which are easily distinguishable. Means which detect altered size and/or charge can be used to detect modified products, including but not limited to electrophoresis, chromatography, and mass spectrometry. Examples of such chemical reagents for selective modification include hydrazine and bisulfite ions. Hydrazine-modified DNA can be treated with piperidine to cleave it. Bisulfite ion-treated DNA can be treated with alkali.

[0055] A variety of amplification techniques may be used in a reaction for creating distinguishable products. Some of these techniques employ PCR. Other suitable amplification methods include the ligase chain reaction (LCR) (Barringer et al, 1990), transcription amplification (Kwoh et al. 1989; WO88/10315), selective amplification of target polynucleotide sequences (U.S. Pat. No. 6,410,276), consensus sequence primed polymerase chain reaction (U.S. Pat. No. 4,437,975), arbitrarily primed polymerase chain reaction (WO90/06995), nucleic acid based sequence amplification (NASBA) (U.S. Pat. Nos. 5,409,818; 5,554,517; 6,063,603), nick displacement amplification (WO2004/067726).

[0056] Sequence variation that reflects the methylation status at CpG dinucleotides in the original genomic DNA offers two approaches to PCR primer design. In the first approach, the primers do not themselves do not “cover” or hybridize to any potential sites of DNA methylation; sequence variation at sites of differential methylation are located between the two primers. Such primers are used in bisulphite genomic sequencing, COBRA, Ms-SNuPE. In the second approach, the primers are designed to anneal specifically with either the methylated or unmethylated version of the converted sequence. If there is a sufficient region of complementarity, e.g., 12, 15, 18, or 20 nucleotides, to the target, then the primer may also contain additional nucleotide residues that do not interfere with hybridization but may be useful for other manipulations. Exemplary of such other residues may be sites for restriction endonuclease cleavage, for ligand binding or for factor binding or linkers or repeats. The oligonucleotide primers may or may not be such that they are specific for modified methylated residues

[0057] One way to distinguish between modified and unmodified DNA is to hybridize oligonucleotide primers which specifically bind to one form or the other of the DNA. After hybridization, an amplification reaction can be performed and amplification products assayed. The presence of an amplification product indicates that a sample hybridized to the primer. The specificity of the primer indicates whether the DNA had been modified or not, which in turn indicates whether the DNA had been methylated or not. For example, bisulfite ions modify non-methylated cytosine bases, changing them to uracil bases. Uracil bases hybridize to adenine bases under hybridization conditions. Thus an oligonucleotide primer which comprises adenine bases in place of guanine bases would hybridize to the bisulfite-modified DNA, whereas an oligonucleotide primer containing the guanine bases would hybridize to the non-modified (methylated) cytosine residues in the DNA. Amplification using a DNA polymerase and a second primer yield amplification products which can be readily observed. Such a method is termed MSP (Methylation Specific PCR; U.S. Pat. Nos. 5,786,146; 6,017,704; 6,200,756). The amplification products can be optionally hybridized to specific oligonucleotide probes which may also be specific for certain products. Alternatively, oligonucleotide probes can be used which will hybridize to amplification products from both modified and nonmodified DNA.

[0058] Another way to distinguish between modified and nonmodified DNA is to use oligonucleotide probes which may also be specific for certain products. Such probes can be hybridized directly to modified DNA or to amplification products of modified DNA. Oligonucleotide probes can be labeled using any detection system known in the art. These include but are not limited to fluorescent moieties, radioisotope labeled moieties, bioluminescent moieties, luminescent moieties, chemiluminescent moieties, enzymes, substrates, receptors, or ligands.

[0059] Still another way for the identification of methylated CpG dinucleotides utilizes the ability of the MBD domain of the McCP2 protein to selectively bind to methylated DNA sequences (Cross et al, 1994; Shiraishi et al, 1999). Restriction enconuclease digested genomic DNA is loaded onto expressed His-tagged methyl-CpG binding domain that is immobilized to a solid matrix and used for preparative column chromatography to isolate highly methylated DNA sequences.

[0060] Real time chemistry allow for the detection of PCR amplification during the early phases of the reactions, and makes quantitation of DNA and RNA easier and more precise. A few variations of the real-time PCR are known. They include the TaqMan system and Molecular Beacon system which have separate probes labeled with a fluorophore and a fuorescence quencher. In the Scorpion system the labeled probe in the form of a hairpin structure is linked to the primer.

[0061] DNA methylation analysis has been performed successfully with a number of techniques which include the MALDI-TOFF, MassARRAY, MethyLight, Quantitative analysis of ethylated alleles (QAMA), enzymatic regional methylation assay (ERMA), HeavyMethyl, QBSUPT, MS-SNuPE, MethylQuant, Quantitative PCR sequencing, Oligonucleotide-based microarray, systems.

[0062] The number of genes whose silencing is tested and/or detected can vary: one, two, three, four, five, or more genes can be tested and/or detected. In some cases at least two genes are selected from one table selected from Tables 1-4 and 6-8. In other embodiments at least three genes are selected from one table selected from Tables 1-4 and 6-8.

[0063] If one or at least two genes are being tested and the cell is a prostate cell, at least one gene can be selected from the group consisting of CD3D, APOC1, NBL1, ING4, LEF1, CENTD3, MGC15396, FKBP4, PLTP, TFAP2A, ATXN1, BMP2, ENPEP, MCAM, SSBP2, PDLIM3, PAK3, B4GALT1, and NDP. More particularly, at least one gene can be selected from the group consisting of BMP2, ENPEP, MCAM, SSBP2, and NDP.

[0064] If one or at least two genes are being tested and the cell is a lung cell, at least one gene can be selected from the group consisting of PHKA2, CBR3, CAMK4, HOXB5, ZNF198, RGS4, RBM15B, PDLIM3, PAK3, PIGH, TUBB4, B4GALT1, and NISCH. More particularly, at least one gene can be selected from the group consisting of PAK3, PIGH, TUBB4, B4GALT1, and NISCH.

[0065] If one or at least two genes are being tested and the cell is a breast cell, at least one gene can be selected from the group consisting of BACH1, CKMT, GALE, HMG20B, KRT14, OGDHL, PON2, SESN1, KIF1A (kinesin family member 1A) PDLIM3 and MAL (T cell proliferation protein). More particularly, at least one gene can be elected from the group consisting of KIF1A (kinesin family member 1A) and MAL (T cell proliferation protein).

[0066] If one or at least two genes are being tested and the cell is a colon cell, at least one gene can be selected from the group consisting of B4GALT1, C10orf119, C10orf13, CBR1, COPS4, COVA1, CSRP1, DARS, DNAJC10, FKBP14, FN3KRP, GANAB, HUS1, KLF11, MRPL4, MYLK, NELF, NETO2, PAPSS2, RBMS2, RHOB, SECTM1, SIRT2, SIRT7, SLC35D1, SLC9A3R1, TTRAP, TUBG2, FLJ20277, MYBL2, GPR116, OSMR, PC4, SLC39A4, UBE3A, PDLIM3, NRTK2, OGDHL,

[0067] SFRP4, SSBP2, and UBE21. More particularly, at least one gene can be selected from the group consisting of GPR116, OSMR, PC4, SLC39A4, UBE3A, PDLIM3 and UBE21.

[0068] If one or at least two genes are being tested and the cell is a cervical cancer cell, at least one gene can be selected from the group consisting of PDCD4, TFPI2, ARMC7, TRM-HUMAN, OGDHL, PTGS2, CDK6, GPR39, HMGN2, C13ORF18, ASMTL, DLL4, NP-659450.1, NP-078820.1, CLU, HPCA, PLCG2, RALY, GNB4, CCNA1 NPTX1 and C90RF19. Particularly the at least one gene can be selected from the group consisting of TFPI2, ARMC7, TRM_HUMAN, OGDHL, PTGS2, GPR39, C13ORF18, ASMTL, CCNA1, NPTX1 and DLL4.

[0069] Testing can be performed diagnostically or in conjunction with a therapeutic regimen. Testing can be used to monitor efficacy of a therapeutic regimen, whether a chemotherapeutic agent or a biological agent, such as a polynucleotide.

[0070] Test cells for diagnostic, prognostic, or personalized medicine uses can be obtained from surgical samples, such as biopsies or fine needle aspirates, from paraffin embedded colon, rectum, breast, ovary, prostate, kidney, lung, brain on other organ tissues, from a body fluid such as bone marrow, blood, serum, lymph, cerebrospinal fluid, saliva, sputum, bronchial-lavage fluid, ductal fluids stool, urine, lymph nodes or semen. Such sources are not meant to be exhaustive, but rather exemplary. A test cell obtainable from such samples or fluids includes detached tumor cells or free nucleic acids that are released from dead tumor cells. Nucleic acids include RNA, genomic DNA, mitochondrial DNA, single or double stranded, and protein-associated nucleic acids. Any nucleic acid specimen in purified or non-purified form obtained from such test cell can be utilized as the starting nucleic acid or acids.

[0071] Demethylating agents can be contacted with cells in vitro or in vivo for the purpose of restoring normal gene expression to the cell. Suitable demethylating agents include, but are not limited to 5-aza-2′-deoxycytidine, 5-aza-cytidine, Zebularine, procaine, and L-ethionine. This reaction may be used for diagnosis, for determining predisposition, and for determining suitable therapeutic regimes. If the demethylating agent is used for treating colon, breast, lung, or prostate cancers, expression or methylation can be tested of a gene selected from the group consisting of CD3D, APOC1, NBL1,ING4, LEF1, CENTD3, MGC15396, FKBP4, PLTP, TFAP2A, ATXN1, BMP2, ENPEP, MCAM, SSBP2, PDLIM3, NDP, PHKA2, CBR3, CAMK4, HOXB5, ZNF198, RGS4, RBM15B, PDLIM3, PAK3, B4GALT1, PIGH, TUBB4, NISCH, BACH1, CKMT, GALE, HMG20B, KRT14, OGDHL, PON2, SESN1, KIF1A (kinesin family member 1A) PDLIM3, MAL (T cell proliferation protein) B4GALT1, C10orf119, C10orf13, CBR1, COPS4, COVA1, CSRP1, DARS, DNAJC10, FKBP14, FN3KRP, GANAB, HUS1, KLF11, MRPL4, MYLK, NELF, NETO2, PAPSS2, RBMS2, RHOB, SECTM1, SIRT2, SIRT7, SLC35D1, SLC9A3R1, TTRAP, TUBG2, FLJ20277, MYBL2, GPR116, OSMR, PC4, SLC39A4, UBE3A, PDLIM3 and UBE21. If the cell is a prostate cell, the gene can be selected from the group consisting of BMP2, ENPEP, MCAM, SSBP2, PAK3, B4GALT1, and NDP. If the cell is a lung cell, the gene can be selected from the group consisting of PAK3, PIGH, TUBB4, B4GALT1, and NISCH. If the cell is a breast cell, the gene can be selected from the group consisting of KIF1A (kinesin family member 1A) and MAL (T cell proliferation protein). If the cell is a colon cell, the gene can be selected from the group consisting of GPR116, OSMR, PC4, SLC39A4, UBE3A, PDLIM3, NRTK2, OGDHL, SFRP4, SSBP2, and UBE21. If the cell is a cervical cancer cell, at least one gene can be selected from the group consisting of PDCD4, TFPI2, ARMC7, TRM-HUMAN, OGDHL, PTGS2, CDK6, GPR39, HMGN2, C13ORF18, ASMTL, DLL4, NP-659450.1, NP-078820.1, CLU, HPCA, PLCG2, RALY, GNB4, CCNA1 NPTX1 and C90RF19. Particularly the at least one gene can be selected from the group consisting of TFPI2, ARMC7, TRM_HUMAN, OGDHL, PTGS2, GPR39, C13ORF18, ASMTL, CCNA1, NPTX1 and DLL4.

[0072] An alternative way to restore epigenetically silenced gene expression is to introduce a non-methylated polynucleotide into a cell, so that it will be expressed in the cell. Various gene therapy vectors and vehicles are known in the art and any can be used as is suitable for a particular situation. Certain vectors are suitable for short term expression and certain vectors are suitable for prolonged expression. Certain vectors are trophic for certain organs and these can be used as is appropriate in the particular situation. Vectors may be viral or non-viral. The polynucleotide can, but need not, be contained in a vector, for example, a viral vector, and can be formulated, for example, in a matrix such as a liposome, microbubbles. The polynucleotide can be introduced into a cell by administering the polynucleotide to the subject such that it contacts the cell and is taken up by the cell and the encoded polypeptide expressed. Suitable polynucleotides are provided in the sequence listing SEQ ID NO: 1-210. Polynucleotides encoding the polypeptides shown in SEQ ID NO: 211-420 can also be used. Preferably the specific polynucleotide will be one which the patient has been tested for and been found to carry a silenced version. The polynucleotides for treating colon, breast, lung, or prostate cancers will typically encode a gene selected from the group consisting of CD3D, APOC1, NBL1, ING4, LEF1, CENTD3, MGC15396, FKBP4, PLTP, TFAP2A, ATXN1, BMP2, ENPEP, MCAM, SSBP2, PDLIM3, NDP, PHKA2, CBR3, CAMK4, HOXB5, ZNF198, RGS4, RBM15B, PDLIM3, PAK3, PIGH, TUBB4, NISCH, BACH1, CKMT, GALE, HMG20B, KRT14, OGDHL, PON2, SESN1, KIF1A (kinesin family member 1A) PDLIM3, MAL (T cell proliferation protein) B4GALT1, C10orf119, C10orf13, CBR1, COPS4, COVA1, CSRP1, DARS, DNAJC10, FKBP14, FN3KRP, GANAB, HUS1, KLF11, MRPL4, MYLK, NELF, NETO2, PAPSS2, RBMS2, RHOB, SECTM1, SIRT2, SIRT7, SLC35D1, SLC9A3R1, TTRAP, TUBG2, FLJ20277, MYBL2, GPR116, OSMR, PC4, SLC39A4, UBE3A, PDLIM3 and UBE21. If the cell is a prostate cell, the gene can be selected from the group consisting of BMP2, ENPEP, MCAM, SSBP2, PAK3, B4GALT1, and NDP. If the cell is a lung cell, the gene can be selected from the group consisting of PAK3, PIGH, TUBB4, B4GALT1, and NISCH. If the cell is a breast cell, the gene can be selected from the group consisting of KIF1A (kinesin family member 1A) and MAL (T cell proliferation protein). If the cell is a colon cell, the gene can be selected from the group consisting of GPR116, OSMR, PC4, SLC39A4, UBE3A, PDLIM3, NRTK2, OGDHL, SFRP4, SSBP2, and UBE21. If the cell is a cervical cancer cell, at least one gene can be selected from the group consisting of PDCD4, TFPI2, ARMC7, TRM-HUMAN, OGDHL, PTGS2, CDK6, GPR39, HMGN2, C130RF18, ASMTL, DLL4, NP-659450.1, NP-078820.1, CLU, HPCA, PLCG2, RALY, GNB4, CCNA1 NPTX1 and C9ORF19. Particularly the at least one gene can be selected from the group consisting of TFPI2, ARMC7, TRM_HUMAN, OGDHL, PTGS2, GPR39, C13ORF18, ASMTL, CCNA1, NPTX1 and DLL4.

[0073] Cells exhibiting methylation silenced gene expression generally are contacted with the demethylating agent in vivo by administering the agent to a subject. Where convenient, the demethylating agent can be administered using, for example, a catheterization procedure, at or near the site of the cells exhibiting unregulated growth in the subject, or into a blood vessel in which the blood is flowing to the site of the cells. Similarly, where an organ, or portion thereof, to be treated can be isolated by a shunt procedure, the agent can be administered via the shunt, thus substantially providing the agent to the site containing the cells. The agent also can be administered systemically or via other routes known in the art.

[0074] The polynucleotide can include, in addition to polypeptide coding sequence, operatively linked transcriptional regulatory elements, translational regulatory elements, and the like, and can be in the form of a naked DNA molecule, which can be contained in a vector, or can be formulated in a matrix such as a liposome or microbubbles that facilitates entry of the polynucleotide into the particular cell. The term “operatively linked” refers to two or more molecules that are positioned with respect to each other such that they act as a single unit and effect a function attributable to one or both molecules or a combination thereof. A polynucleotide sequence encoding a desired polypeptide can be operatively linked to a regulatory element, in which case the regulatory element confers its regulatory effect on the polynucleotide similar to the way in which the regulatory element would affect a polynucleotide sequence with which it normally is associated with in a cell.

[0075] The polynucleotide encoding the desired polypeptide to be administered to a mammal or a human or to be contacted with a cell may contain a promoter sequence, which can provide constitutive or, if desired, inducible or tissue specific or developmental stage specific expression of the polynucleotide, a poly-A recognition sequence, and a ribosome recognition site or internal ribosome entry site, or other regulatory elements such as an enhancer, which can be tissue specific. The vector also may contain elements required for replication in a prokaryotic or eukaryotic host system or both, as desired. Such vectors, which include plasmid vectors and viral vectors such as bacteriophage, baculovirus, retrovirus, lentivirus, adenovirus, vaccinia virus, semliki forest virus and adeno-associated virus vectors, are well known and can be purchased from a commercial source (Promega, Madison Wis.; Stratagene, La Jolla Calif.; GIBCO/BRL, Gaithersburg Md.) or can be constructed by one skilled in the art (see, for example, Meth. Enzymol., Vol. 185, Goeddel, ed. (Academic Press, Inc., 1990); Jolly, Canc. Gene Ther. 1:51-64, 1994; Flotte, J. Bioenerg. Biomemb. 25:37-42, 1993; Kirshenbaum et al., J. Clin. Invest. 92:381-387, 1993; each of which is incorporated herein by reference).

[0076] A tetracycline (tet) inducible promoter can be used for driving expression of a polynucleotide encoding a desired polypeptide. Upon administration of tetracycline, or a tetracycline analog, to a subject containing a polynucleotide operatively linked to a tet inducible promoter, expression of the encoded polypeptide is induced. The polynucleotide alternatively can be operatively linked to tissue specific regulatory element, for example, a liver cell specific regulatory element such as an α-fetoprotein promoter (Kanai et al., Cancer Res. 57:461-465, 1997; He et al., J. Exp. Clin. Cancer Res. 19:183-187, 2000) or an albumin promoter (Power et al., Biochem. Biophys. Res. Comm. 203:1447-1456, 1994; Kuriyama et al., Int. J. Cancer 71:470-475, 1997); a muscle cell specific regulatory element such as a myoglobin promoter (Devlin et al., J. Biol. Chem. 264:13896-13901, 1989; Yan et al., J. Biol. Chem. 276:17361-17366, 2001); a prostate cell specific regulatory element such as the PSA promoter (Schuur et al., J. Biol. Chem. 271:7043-7051, 1996; Latham et al., Cancer Res. 60:334-341, 2000); a pancreatic cell specific regulatory element such as the elastase promoter (Ornitz et al., Nature 313:600-602, 1985; Swift et al., Genes Devel. 3:687-696, 1989); a leukocyte specific regulatory element such as the leukosialin (CD43) promoter (Shelley et al., Biochem. J. 270:569-576, 1990; Kudo and Fukuda, J. Biol. Chem. 270:13298-13302, 1995); or the like, such that expression of the polypeptide is restricted to particular cell in an individual, or to particular cells in a mixed population of cells in culture, for example, an organ culture. Regulatory elements, including tissue specific regulatory elements, many of which are commercially available, are well known in the art (see, for example, InvivoGen; San Diego Calif.).

[0077] Viral expression vectors can be used for introducing a polynucleotide into a cell, particularly a cell in a subject. Viral vectors provide the advantage that they can infect host cells with relatively high efficiency and can infect specific cell types. For example, a polynucleotide encoding a desired polypeptide can be cloned into a baculovirus vector, which then can be used to infect an insect host cell, thereby providing a means to produce large amounts of the encoded polypeptide. Viral vectors have been developed for use in particular host systems, particularly mammalian systems and include, for example, retroviral vectors, other lentivirus vectors such as those based on the human immunodeficiency virus (HIV), adenovirus vectors, adeno-associated virus vectors, herpesvirus vectors, hepatitis virus vectors, vaccinia virus vectors, and the like (see Miller and Rosman, BioTechniques 7:980-990, 1992; Anderson et al., Nature 392:25-30 Suppl., 1998; Verma and Somia, Nature 389:239-242, 1997; Wilson, New Engl. J. Med. 334:1185-1187 (1996), each of which is incorporated herein by reference).

[0078] A polynucleotide, which can optionally be contained in a vector, can be introduced into a cell by any of a variety of methods known in the art (Sambrook et al., supra, 1989; Ausubel et al., Current Protocols in Molecular Biology, John Wiley and Sons, Baltimore, Md. (1987, and supplements through 1995), each of which is incorporated herein by reference). Such methods include, for example, transfection, lipofection, microinjection, electroporation and, with viral vectors, infection; and can include the use of liposomes, microemulsions or the like, which can facilitate introduction of the polynucleotide into the cell and can protect the polynucleotide from degradation prior to its introduction into the cell. A particularly useful method comprises incorporating the polynucleotide into microbubbles, which can be injected into the circulation. An ultrasound source can be positioned such that ultrasound is transmitted to the tumor, wherein circulating microbubbles containing the polynucleotide are disrupted at the site of the tumor due to the ultrasound, thus providing the polynucleotide at the site of the cancer. The selection of a particular method will depend, for example, on the cell into which the polynucleotide is to be introduced, as well as whether the cell is in culture or in situ in a body.

[0079] Introduction of a polynucleotide into a cell by infection with a viral vector can efficiently introduce the nucleic acid molecule into a cell. Moreover, viruses are very specialized and can be selected as vectors based on an ability to infect and propagate in one or a few specific cell types. Thus, their natural specificity can be used to target the nucleic acid molecule contained in the vector to specific cell types. A vector based on an HIV can be used to infect T cells, a vector based on an adenovirus can be used, for example, to infect respiratory epithelial cells, a vector based on a herpesvirus can be used to infect neuronal cells, and the like. Other vectors, such as adeno-associated viruses can have greater host cell range and, therefore, can be used to infect various cell types, although viral or non-viral vectors also can be modified with specific receptors or ligands to alter target specificity through receptor mediated events. A polynucleotide of the invention, or a vector containing the polynucleotide can be contained in a cell, for example, a host cell, which allows propagation of a vector containing the polynucleotide, or a helper cell, which allows packaging of a viral vector containing the polynucleotide. The polynucleotide can be transiently contained in the cell, or can be stably maintained due, for example, to integration into the cell genome.

[0080] A polypeptide according to any of SEQ ID NO: 211-420 can be administered directly to the site of a cell exhibiting unregulated growth in the subject. The polypeptide can be produced and isolated, and formulated as desired, using methods as disclosed herein, and can be contacted with the cell such that the polypeptide can cross the cell membrane of the target cells. The polypeptide may be provided as part of a fusion protein, which includes a peptide or polypeptide component that facilitates transport across cell membranes. For example, a human immunodeficiency virus (HIV) TAT protein transduction domain or a nuclear localization domain may be fused to the marker of interest. The administered polypeptide can be formulated in a matrix that facilitates entry of the polypeptide into a cell.

[0081] An agent such as a demethylating agent, a polynucleotide, or a polypeptide is typically formulated in a composition suitable for administration to the subject. Thus, the invention provides compositions containing an agent that is useful for restoring regulated growth to a cell exhibiting unregulated growth due to methylation silenced transcription of one or more genes. The agents are useful as medicaments for treating a subject suffering from a pathological condition associated with such unregulated growth. Such medicaments generally include a carrier. Acceptable carriers are well known in the art and include, for example, aqueous solutions such as water or physiologically buffered saline or other solvents or vehicles such as glycols, glycerol, oils such as olive oil or injectable organic esters. An acceptable carrier can contain physiologically acceptable compounds that act, for example, to stabilize or to increase the absorption of the conjugate. Such physiologically acceptable compounds include, for example, carbohydrates, such as glucose, sucrose or dextrans, antioxidants, such as ascorbic acid or glutathione, chelating agents, low molecular weight proteins or other stabilizers or excipients. One skilled in the art would know or readily be able to determine an acceptable carrier, including a physiologically acceptable compound. The nature of the carrier depends on the physico-chemical characteristics of the therapeutic agent and on the route of administration of the composition. Administration of therapeutic agents or medicaments can be by the oral route or parenterally such as intravenously, intramuscularly, subcutaneously, transdermally, intranasally, intrabronchially, vaginally, rectally, intratumorally, or other such method known in the art. The pharmaceutical composition also can contain one more additional therapeutic agents.

[0082] The therapeutic agents can be incorporated within an encapsulating material such as into an oil-in-water emulsion, a microemulsion, micelle, mixed micelle, liposome, microsphere, microbubbles or other polymer matrix (see, for example, Gregoriadis, Liposome Technology, Vol. 1 (CRC Press, Boca Raton, Fla. 1984); Fraley, et al., Trends Biochem. Sci., 6:77 (1981), each of which is incorporated herein by reference). Liposomes, for example, which consist of phospholipids or other lipids, are nontoxic, physiologically acceptable and metabolizable carriers that are relatively simple to make and administer. “Stealth” liposomes (see, for example, U.S. Pat. Nos. 5,882,679; 5,395,619; and 5,225,212, each of which is incorporated herein by reference) are an example of such encapsulating materials particularly useful for preparing a composition useful in a method of the invention, and other “masked” liposomes similarly can be used, such liposomes extending the time that the therapeutic agent remain in the circulation. Cationic liposomes, for example, also can be modified with specific receptors or ligands (Morishita et al., J. Clin. Invest., 91:2580-2585 (1993), which is incorporated herein by reference). In addition, a polynucleotide agent can be introduced into a cell using, for example, adenovirus-polylysine DNA complexes (see, for example, Michael et al., J. Biol. Chem. 268:6866-6869 (1993), which is incorporated herein by reference).

[0083] The route of administration of the composition containing the therapeutic agent will depend, in part, on the chemical structure of the molecule. Polypeptides and polynucleotides, for example, are not efficiently delivered orally because they can be degraded in the digestive tract. However, methods for chemically modifying polypeptides, for example, to render them less susceptible to degradation by endogenous proteases or more absorbable through the alimentary tract may be used (see, for example, Blondelle et al., supra, 1995; Ecker and Crook, supra, 1995).

[0084] The total amount of an agent to be administered in practicing a method of the invention can be administered to a subject as a single dose, either as a bolus or by infusion over a relatively short period of time, or can be administered using a fractionated treatment protocol, in which multiple doses are administered over a prolonged period of time. One skilled in the art would know that the amount of the composition to treat a pathologic condition in a subject depends on many factors including the age and general health of the subject as well as the route of administration and the number of treatments to be administered. In view of these factors, the skilled artisan would adjust the particular dose as necessary. In general, the formulation of the composition and the routes and frequency of administration are determined, initially, using Phase I and Phase II clinical trials.

[0085] The composition can be formulated for oral formulation, such as a tablet, or a solution or suspension form; or can comprise an admixture with an organic or inorganic carrier or excipient suitable for enteral or parenteral applications, and can be compounded, for example, with the usual non-toxic, pharmaceutically acceptable carriers for tablets, pellets, capsules, suppositories, solutions, emulsions, suspensions, or other form suitable for use. The carriers, in addition to those disclosed above, can include glucose, lactose, mannose, gum acacia, gelatin, mannitol, starch paste, magnesium trisilicate, talc, corn starch, keratin, colloidal silica, potato starch, urea, medium chain length triglycerides, dextrans, and other carriers suitable for use in manufacturing preparations, in solid, semisolid, or liquid form. In addition auxiliary, stabilizing, thickening or coloring agents and perfumes can be used, for example a stabilizing dry agent such as triulose (see, for example, U.S. Pat. No. 5,314,695).

[0086] Although accuracy and sensitivity may be achieved by using a combination of markers, such as 5 or 6 markers, practical considerations may dictate use of smaller combinations. Any combination of markers for a specific cancer may be used which comprises 2, 3, 4, or 5 markers. Each of the combinations for two and three markers are listed in attached Tables found on CD-ROM. Other combinations of four or five markers can be readily envisioned given the specific disclosures of individual markers provided herein.

[0087] The level of methylation of the differentially methylated GpG islands can provide a variety of information a about the disease or cancer. It can be used to diagnose a disease or cancer in the individual. Alternatively, it can be used to predict the course of the disease or cancer in the individual or to predict the suspectibility to disease or cancer or to stage the progression of the disease or cancer in the individual. Otherwise, it can help to predict the likelihood of overall survival or predict the likelihood of reoccurrence of disease or cancer and to determine the effectiveness of a treatment course undergone by the individual. Increase or decrease of methylation levels in comparison with reference level and alterations in the increase/decrease when detected provide useful prognostic and diagnostic value.

[0088] The prognostic methods can be used to identify surgically treated patients likely to experience cancer reoccurrence. Such patients can be offered additional therapeutic options, including pre-operative or post-operative options such as chemotherapy, radiation, biological modifiers, or other therapies.

[0089] A therapeutic strategy for treating a prostate, lung, breast, or colon cancer patient can be selected based on reactivation of epigenetically silenced genes. First a gene selected from those listed in Table 5 is identified whose expression in cancer cells of the patient is reactivated by a demethylating agent. Then a therapeutic agent is selected which reactivates expression of the gene. If the cancer cells are breast or lung cells, the gene is not APC. If the cell is a prostate cell, a lung cell, a breast cell or a colon cell, the gene can be selected from the group consisting of CD3D, APOC1, NBL1, ING4, LEF1, CENTD3, MGC15396, FKBP4, PLTP, TFAP2A, ATXN1, BMP2, ENPEP, MCAM, SSBP2, PDLIM3, NDP, PHKA2, CBR3, CAMK4, HOXB5, ZNF198, RGS4, RBM15B, PDLIM3, PAK3, PIGH, TUBB4, NISCH, BACH1, CKMT, GALE, HMG20B, KRT14, OGDHL, PON2, SESN1, KIF1A (kinesin family member 1A) PDLIM3, MAL (T cell proliferation protein) B4GALT1, C10orf119, C10orf13, CBR1, COPS4, COVA1, CSRP1, DARS, DNAJC10, FKBP14, FN3KRP, GANAB, HUS1, KLF11, MRPL4, MYLK, NELF, NETO2, PAPSS2, RBMS2, RHOB, SECTM1, SIRT2, SIRT7, SLC35D1, SLC9A3R1, TTRAP, TUBG2, FLJ20277, MYBL2, GPR116, OSMR, PC4, SLC39A4, UBE3A, PDLIM3, NRTK2, SFRP4, SSBP2, and UBE21. More particularly, the gene can be selected from the group consisting of BMP2, ENPEP, MCAM, SSBP2, NDP, PAK3, PIGH, TUBB4, and NISCH. KIF1A (kinesin family member 1A), MAL (T cell proliferation protein), GPR116, OSMR, PC4, SLC39A4, UBE3A, PDLIM3, NRTK2, OGDHL, SFRP4, SSBP2, and UBE21. If the cancer is prostate cancer, the gene can be selected from the group consisting of BMP2, ENPEP, MCAM, SSBP2, PAK3, B4GALT1, and NDP. If the cancer is lung cancer, the gene can be selected from the group consisting of PAK3, PIGH, TUBB4, B4GALT1, and NISCH. If the cancer is breast cancer, the gene can be selected from the group consisting of KIF1A (kinesin family member 1A) and MAL (T cell proliferation protein). If the cancer is colon cancer, the gene can be selected from the group consisting of GPR116, OSMR, PC4, SLC39A4, UBE3A, PDLIM3, and UBE21. If the cell is a cervical cancer cell, at least one gene can be selected from the group consisting of PDCD4, TFPI2, ARMC7, TRM-HUMAN, OGDHL, PTGS2, CDK6, GPR39, HMGN2, C130RF18, ASMTL, DLL4, NP-659450.1, NP-078820.1, CLU, HPCA, PLCG2, RALY, GNB4, CCNA1 NPTX1 and C90RF19. Particularly the at least one gene can be selected from the group consisting of TFPI2, ARMC7, TRM_HUMAN, OGDHL, PTGS2, GPR39, C13ORF18, ASMTL, CCNA1, NPTX1 and DLL4.

[0090] Kits according to the present invention are assemblages of reagents for testing methylation. They are typically in a package which contains all elements, optionally including instructions. The package may be divided so that components are not mixed until desired. Components may be in different physical states. For example, some components may be lyophilized and some in aqueous solution. Some may be frozen. Individual components may be separately packaged within the kit. The kit may contain reagents, as described above for differentially modifying methylated and non-methylated cytosine residues. Desirably the kit will contain oligonucleotide primers which specifically hybridize to regions within 1 kb of the transcription start sites of the genes/markers identified in the attached Table 5. Typically the kit will contain both a forward and a reverse primer for a single gene or marker. If there is a sufficient region of complementarity, e.g., 12, 15, 18, or 20 nucleotides, then the primer may also contain additional nucleotide residues that do not interfere with hybridization but may be useful for other manipulations. Exemplary of such other residues may be sites for restriction endonuclease cleavage, for ligand binding or for factor binding or linkers or repeats. The oligonucleotide primers may or may not be such that they are specific for modified methylated residues. The kit may optionally contain oligonucleotide probes. The probes may be specific for sequences containing modified methylated residues or for sequences containing non-methylated residues. The kit may optionally contain reagents for modifying methylated cytosine residues. The kit may also contain components for performing amplification, such as a DNA polymerase and deoxyribonucleotides. Means of detection may also be provided in the kit, including detectable labels on primers or probes. Kits may also contain reagents for detecting gene expression for one of the markers of the present invention (Table 5). Such reagents may include probes, primers, or antibodies, for example. In the case of enzymes or ligands, substrates or binding partners may be sued to assess the presence of the marker.

[0091] In one aspect of this embodiment, the gene is contacted with hydrazine, which modifies cytosine residues, but not methylated cytosine residues, then the hydrazine treated gene sequence is contacted with a reagent such as piperidine, which cleaves the nucleic acid molecule at hydrazine modified cytosine residues, thereby generating a product comprising fragments. By separating the fragments according to molecular weight, using, for example, an electrophoretic, chromatographic, or mass spectrographic method, and comparing the separation pattern with that of a similarly treated corresponding non-methylated gene sequence, gaps are apparent at positions in the test gene contained methylated cytosine residues. As such, the presence of gaps is indicative of methylation of a cytosine residue in the CpG dinucleotide in the target gene of the test cell.

[0092] Bisulfite ions, for example, sodium bisulfite, convert non-methylated cytosine residues to bisulfite modified cytosine residues. The bisulfite ion treated gene sequence can be exposed to alkaline conditions, which convert bisulfite modified cytosine residues to uracil residues. Sodium bisulfite reacts readily with the 5,6-double bond of cytosine (but poorly with methylated cytosine) to form a sulfonated cytosine reaction intermediate that is susceptible to deamination, giving rise to a sulfonated uracil. The sulfonate group can be removed by exposure to alkaline conditions, resulting in the formation of uracil. The DNA can be amplified, for example, by PCR, and sequenced to determine whether CpG sites are methylated in the DNA of the sample. Uracil is recognized as a thymine by Taq polymerase and, upon PCR, the resultant product contains cytosine only at the position where 5-methylcytosine was present in the starting template DNA. One can compare the amount or distribution of uracil residues in the bisulfite ion treated gene sequence of the test cell with a similarly treated corresponding non-methylated gene sequence. A decrease in the amount or distribution of uracil residues in the gene from the test cell indicates methylation of cytosine residues in CpG dinucleotides in the gene of the test cell. The amount or distribution of uracil residues also can be detected by contacting the bisulfite ion treated target gene sequence, following exposure to alkaline conditions, with an oligonucleotide that selectively hybridizes to a nucleotide sequence of the target gene that either contains uracil residues or that lacks uracil residues, but not both, and detecting selective hybridization (or the absence thereof) of the oligonucleotide.

[0093] Any marker can be used for testing lung, prostate, breast or colon cells selected from the group consisting of CD3D, APOC1, NBL1, ING4, LEF1, CENTD3, MGC15396, FKBP4, PLTP, TFAP2A, ATXN1, BMP2, ENPEP, MCAM, SSBP2, PDLIM3, NDP, PHKA2, CBR3, CAMK4, HOXB5, ZNF198, RGS4, RBM15B, PDLIM3, PAK3, PIGH, TUBB4, NISCH, BACH1, CKMT, GALE, HMG20B, KRT14, OGDHL, PON2, SESN1, KIF1A (kinesin family member 1A) PDLIM3, MAL (T cell proliferation protein) B4GALT1, C10orf119, C10orf13, CBR1, COPS4, COVA1, CSRP1, DARS, DNAJC10, FKBP14, FN3KRP, GANAB, HUS1, KLF11, MRPL4, MYLK, NELF, NETO2, PAPSS2, RBMS2, RHOB, SECTM1, SIRT2, SIRT7, SLC35D1, SLC9A3R1, TTRAP, TUBG2, FLJ20277, MYBL2, GPR116, OSMR, PC4, SLC39A4, UBE3A, PDLIM3, NRTK2, SFRP4, SSBP2, and UBE21. Markers which are useful for prostate cancer are CD3D, APOC1, NBL1, ING4, LEF1, CENTD3, MGC15396, FKBP4, PLTP, TFAP2A, ATXN1, BMP2, ENPEP, MCAM, SSBP2, PDLIM3, PAK3, B4GALT1, and NDP. Particularly useful among these are BMP2, ENPEP, MCAM, SSBP2, and NDP. Markers which are useful for lung cancer are PHKA2, CBR3, CAMK4, HOXB5, ZNF198, RGS4, RBM15B, PDLIM3, PAK3, PIGH, TUBB4, B4GALT1, and NISCH. Particularly useful among these are PAK3, PIGH, TUBB4, B4GALT1, and NISCH. Markers which are useful for breast cancer are BACH1, CKMT, GALE, HMG20B, KRT14, OGDHL, PON2, SESN1, KIF1A (kinesin family member 1A) PDLIM3 and MAL (T cell proliferation protein). Particularly useful among these are KIF1A (kinesin family member 1A) and MAL (T cell proliferation protein). Markers which are useful for colon cancer are B4GALT1, C10orf119, C10orf13, CBR1, COPS4, COVA1, CSRP1, DARS, DNAJC10, FKBP14, FN3KRP, GANAB, HUS1, KLF11, MRPL4, MYLK, NELF, NETO2, PAPSS2, RBMS2, RHOB, SECTM1, SIRT2, SIRT7, SLC35D1, SLC9A3R1, TTRAP, TUBG2, FLJ20277, MYBL2, GPR116, OSMR, PC4, SLC39A4, UBE3A, PDLIM3, NRTK2, OGDHL, SFRP4, SSBP2, and UBE21. Particularly useful among these are GPR116, OSMR, PC4, SLC39A4, UBE3A, PDLIM3 and UBE21. If the cell is a cervical cancer cell, at least one gene can be selected from the group consisting of PDCD4, TFPI2, ARMC7, TRM-HUMAN, OGDHL, PTGS2, CDK6, GPR39, HMGN2, C13ORF18, ASMTL, DLL4, NP-659450.1, NP-078820.1, CLU, HPCA, PLCG2, RALY, GNB4, CCNA1 NPTX1 and C90RF19. Particularly the at least one gene can be selected from the group consisting of TFPI2, ARMC7, TRM_HUMAN, OGDHL, PTGS2, GPR39, C13ORF18, ASMTL, CCNA1, NPTX1 and DLL4.

[0094] Test compounds can be tested for their potential to treat cancer. Cancer cells for testing can be selected from the group consisting of prostate, lung, breast, and colon cancer. Expression of a gene selected from those listed in Table 5 is determined and if it is increased by the compound in the cell or if methylation of the gene is decreased by the compound in the cell, one can identify it as having potential as a treatment for cancer. For this purpose, the gene can be selected from the group consisting of CD3D, APOC1, NBL1, ING4, LEF1, CENTD3, MGC15396, FKBP4, PLTP, TFAP2A, ATXN1, BMP2, ENPEP, MCAM, SSBP2, PDLIM3, NDP, PHKA2, CBR3, CAMK4, HOXB5, ZNF198, RGS4, RBM15B, PDLIM3, PAK3, PIGH, TUBB4, NISCH, BACH1, CKMT, GALE, HMG20B, KRT14, OGDHL, PON2, SESN1, KIF1A (kinesin family member 1A) PDLIM3, MAL (T cell proliferation protein) B4GALT1, C10orf119, C10orf13, CBR1, COPS4, COVA1, CSRP1, DARS, DNAJC10, FKBP14, FN3KRP, GANAB, HUS1, KLF11, MRPL4, MYLK, NELF, NETO2, PAPSS2, RBMS2, RHOB, SECTM1, SIRT2, SIRT7, SLC35D1, SLC9A3R1, TTRAP, TUBG2, FLJ20277, MYBL2, GPR116, OSMR, PC4, SLC39A4, UBE3A, PDLIM3, NRTK2, SFRP4, SSBP2, and UBE21. More particularly, the gene can be selected from the group consisting of BMP2, ENPEP, MCAM, SSBP2, NDP, PAK3, PIGH, TUBB4, and NISCH. KIF1A (kinesin family member 1A), MAL (T cell proliferation protein), GPR116, OSMR, PC4, SLC39A4, UBE3A, PDLIM3 and UBE21. If the cell is a prostate cell, the gene can be selected from the group consisting of BMP2, ENPEP, MCAM, SSBP2, PAK3, B4GALT1, and NDP. If the cell is a lung cell, the gene can be selected from the group consisting of PAK3, PIGH, TUBB4, B4GALT1, and NISCH. If the cell is a breast cell, the gene can be selected from the group consisting of KIF1A (kinesin family member 1A) and MAL (T cell proliferation protein). If the cell is a colon cell, the gene can be selected from the group consisting of GPR116, OSMR, PC4, SLC39A4, UBE3A, PDLIM3, NRTK2, OGDHL, SFRP4, SSBP2, and UBE21. If the cell is a cervical cancer cell, at least one gene can be selected from the group consisting of PDCD4, TFPI2, ARMC7, TRM-HUMAN, OGDHL, PTGS2, CDK6, GPR39, HMGN2, C13ORF18, ASMTL, DLL4, NP-659450.1, NP-078820.1, CLU, HPCA, PLCG2, RALY, GNB4, CCNA1 NPTX1 and C90RF19. Particularly the at least one gene can be selected from the group consisting of TFPI2, ARMC7, TRM_HUMAN, OGDHL, PTGS2, GPR39, C130RF18, ASMTL, CCNA1, NPTX1 and DLL4.

[0095] Alternatively such tests can be used to determine a prostate, lung, breast, or colon cancer patient's response to a chemotherapeutic agent. The patient can be treated with a chemotherapeutic agent. If expression of a gene selected from those listed in Table 5 is increased by the compound in cancer cells or if methylation of the gene is decreased by the compound in cancer cells it can be selected as useful for treatment of the patient. If the patient has cancer cells which are prostate, a lung, a breast, or colon, the gene can be selected from the group consisting of CD3D, APOC1, NBL1, ING4, LEF1, CENTD3, MGC15396, FKBP4, PLTP, TFAP2A, ATXN1, BMP2, ENPEP, MCAM, SSBP2, PDLIM3, NDP, PHKA2, CBR3, CAMK4, HOXB5, ZNF198, RGS4, RBM15B, PDLIM3, PAK3, PIGH, TUBB4, NISCH, BACH1, CKMT, GALE, HMG20B, KRT14, OGDHL, PON2, SESN1, KIF1A (kinesin family member 1A) PDLIM3, MAL (T cell proliferation protein) B4GALT1, C10orf119, C10orf13, CBR1, COPS4, COVA1, CSRP1, DARS, DNAJC10, FKBP14, FN3KRP, GANAB, HUS1, KLF11, MRPL4, MYLK, NELF, NETO2, PAPSS2, RBMS2, RHOB, SECTM1, SIRT2, SIRT7, SLC35D1, SLC9A3R1, TTRAP, TUBG2, FLJ20277, MYBL2, GPR116, OSMR, PC4, SLC39A4, UBE3A, PDLIM3, NRTK2, SFRP4, SSBP2, and UBE21. More particularly, the marker or gene can be selected from the group consisting of BMP2, ENPEP, MCAM, SSBP2, NDP, PAK3, PIGH, TUBB4, and NISCH. KIF1A (kinesin family member 1A), MAL (T cell proliferation protein), GPR116, OSMR, PC4, SLC39A4, UBE3A, PDLIM3 and UBE21. If the patient has prostate cancer, the gene can be selected from the group consisting of BMP2, ENPEP, MCAM, SSBP2, PAK3, B4GALT1, and NDP. If the patient has lung cancer, the gene can be selected from the group consisting of PAK3, PIGH, TUBB4, B4GALT1, and NISCH. If the patient has breast cancer, the gene can be selected from the group consisting of KIF1A (kinesin family member 1A) and MAL (T cell proliferation protein). If the patient has colon cancer, the gene can be selected from the group consisting of GPR116, OSMR, PC4, SLC39A4, UBE3A, PDLIM3, NRTK2, OGDHL, SFRP4, SSBP2, and UBE21. If the cell is a cervical cancer cell, at least one gene can be selected from the group consisting of PDCD4, TFPI2, ARMC7, TRM-HUMAN, OGDHL, PTGS2, CDK6, GPR39, HMGN2, C130RF18, ASMTL, DLL4, NP-659450.1, NP-078820.1, CLU, HPCA, PLCG2, RALY, GNB4, CCNA1 NPTX1 and C9ORF19. Particularly the at least one gene can be selected from the group consisting of TFPI2, ARMC7, TRM_HUMAN, OGDHL, PTGS2, GPR39, C13ORF18, ASMTL, CCNA1, NPTX1 and DLL4.

[0096] According to additional aspects of the invention the finding of methylation of genes encoding proteins which are known to affect drug efficacy permits the use of methylation assays to predict response and stratify patients. For example, CBR-1 enhances the potency of doxorubicin, a chemotherapy drug. Methylation of the CBR-1 gene decreases the expression of CBR-1 thereby decreasing the potency of doxorubicin in the patient. Thus methylation of CBR-1 genes can be tested, and if found to be greater than in controls, than treatment with doxorubicin will be contraindicated. If methylation is not greater than in controls, such therapy is predicted to be efficacious. Similarly, methylation of genes such as TK-1, MYCK, and KCNJ8 can be used to predict drug efficacy and risk of disease. Methylation of TK-1 predicts a better response to DNA damaging agents, since TK-1 helps a cell circumvent the effects of DNA damaging agents. MYCK methylation can be used to predict the efficacy of methotrexate and mercaptopurinol treatment for leukemia. Similarly methylation of KCNJ8 can be used to predict risk of heart arrhythmia.

[0097] The above disclosure generally describes the present invention. All references disclosed herein are expressly incorporated by reference. A more complete understanding can be obtained by reference to the following specific examples which are provided herein for purposes of illustration only, and are not intended to limit the scope of the invention.

### EXAMPLE 1

### Methylation for Prostate Cancer

[0098] Data were collected during a re-expression experiment using the prostate cancer cell lines 22rv1, DU145, LNACAP, and PC3. Expression levels of cells treated with 5 μM 5-Azacytidine (DAC) were compared to identical cell lines not treated with this reagent by hybridization to an Affymetrix HGU133A chip using a standard protocol.

[0099] Analysis Strategy:

[0100] A. The datasets containing information on around 23.000 genes were copied from the data archive on the ‘Methalyzer’ to a newly created directory.

[0101] B. The needed details on the Affymetrix HGU133A chip were downloaded to the data analysis area of ‘Methalyzer’

[0102] C. The needed analysis tools (specific ‘R’ libraries for the bioconductor package) updated

[0103] D. To estimate the raw data quality, two graphical overviews were created:
[0104] Intensity plots for each chip on its own
[0105] RNA degradation plot

[0106] E. Data sets were normalized together using the tool called ‘expresso’ applying the following parameters:
[0107] Background correction: Mas
[0108] Normalization: quantiles
[0109] PM correction: Mas
[0110] Expression: Mas

[0111] F. The result of the normalization was tested using a boxplot which displayed the intensity level calculated for each gene present on the chip.

[0112] G. ‘P’ (present) ‘M’, (marginal) and ‘A’ (absent) calls made available by the MAS5 algorithm (Affymetrix software) for each gene and each experiment were collected and transferred to an Excel sheet.

[0113] H. Using MS Excel, ‘P’ and ‘A’ calls were converted into an ‘Expression Score’ using the following rules:
[0114] a. ‘P’ in the DAC treatment data sets got a score of 1
[0115] b. ‘A’ in the non-treatment data sets got a score of 1

[0116] I. For each gene, the Expression Score was calculated

[0117] J. A cut-off of 5 was defined as the first minimal criterion a gene had to fulfill

[0118] K. As certain genes are present more than once on the chips used, a Perl script was created which allowed linking the probe set name on the chip and the corresponding RefSeq ID.

[0119] L. The list of genes was restructured in such a way that each probe set was described in one row

[0120] M. The table was transferred into a purpose built MS Access database

[0121] N. A table containing the Methascores 2.2 of all described genes was added to the database system

[0122] O. The following filtering rules were applied to the dataset
[0123] a. X-chromosomal genes were excluded
[0124] b. Expression of the genes was ranked descending
[0125] c. Methascore 2.2 had to be >3 and the number of different patterns per gene had to be >3
   Reactivated genes are shown in Table 4.

### EXAMPLE 2

### Methylation for Lung Cancer

[0126] Data were collected during re-expression experiments using squamous lung cancer cell lines HTB-58 and HTB-59 as well as lung adenocarcinoma cell lines A549 and H23. Expression levels in cells treated with 2 μM 5-Azacytidine (DAC) were compared to identical cell lines not treated with this reagent (PBS as replacement) by hybridization to Affymetrix HGU133A chip and the HGU95av2 chip using a standard protocol.

[0127] Analysis Strategy:

[0128] A. The datasets containing information on the probe sets were copied from the data archive on the ‘Methalyzer’ to a newly created directory.

[0129] B. The needed details on the Affyrmetrix HGU133A chip and the HGU95av2 chip were downloaded to the data analysis area of ‘Methalyzer’

[0130] C. The needed analysis tools (specific ‘R’ libraries for the bioconductor package) updated

[0131] D. To estimate the raw data quality, two graphical overviews were created:
[0132] a. Boxplot of intensities for each chip before normalization
[0133] b. RNA degradation plot of each data set

[0134] E. Data sets were normalized together using the tool called ‘expresso’ applying the following parameters:
[0135] a. Background correction: Mas
[0136] b. Normalization: quantiles
[0137] c. PM correction: Mas
[0138] d. Expression: Mas

[0139] F. The result of the normalization was tested using a boxplot which displayed the intensity level calculated for each gene present on the chip.

[0140] G. ‘P’ (present) ‘M’, (marginal) and ‘A’ (absent) calls made available by the MAS5 algorithm (Affymetrix software) for each gene and each experiment were collected and transferred to an Excel sheet.

[0141] H. Using MS Excel, ‘P’ and ‘A’ calls were converted into an ‘Expression Score’ using the

[0142] following rules:

[0143] a. ‘P’ in the DAC treatment data sets got a score of 1

[0144] b. ‘A’ in the non-treatment data sets got a score of 1

[0145] I. For each gene, the Expression Score was calculated

[0146] J. A cut-off of 4 in the cans of squamous lung cancer cell lines and of 2 in the case of adenocarcinoma of the lung cell lines was defined as the first minimal criterion a gene had to fulfill

[0147] K. As certain genes are present more than once on the chips used, a Perl script was created which allowed to link the probe set name on the chip and the corresponding RefSeq ID.

[0148] L. The list of genes was restructured in such a way that each probe set was described in

[0149] one row

[0150] M. The table was transferred into a purpose built MS Access database

[0151] N. A table containing the Methascores 2.2 of all described genes was added to the database system

[0152] O. The following filtering rules were applied to the dataset

[0153] a. X-chromosomal genes were excluded

[0154] b. Expression scores were ranked descending and a cut-off of >4 (squamous) and >2 (adenocarcinoma of the lung) was set

[0155] c. Methascore 2.2 cut-off was set to >4 for both type of cell lines

[0156] Reactivated genes are shown in Tables 1, 2, and 3 for squamous lung cancers, adenocarcinoma lung cancers, and both lung cancers.

[0157] Summary analysis of both types of lung cancer cell lines:

[0158] This study consisted of a comparison of the results achieved with both types of cell lines. As two different chip generations with different technical specifications and only few common probe sets were used, the results were compared on a list by list basis. Both data sets have been normalized within chips and across chips in the right concept. Given this, it can be assumed that the results are valid on their own.

[0159] A comparison of the initial two lists indicated that there is one common element called “PLSC domain containing protein (LOC254531)”. This means that this marker can be used to detect both types of lung cancer but not to distinguish between both types of cancer. One additional marker for adenocarcinoma of the lung was found which doesn't occur in the squamous lung cancer cell line study (MCAM).

### EXAMPLE 3

### Methylation for Colorectal Cancer

[0160] Data were collected during a re-expression experiment using the colorectal cancer cell lines DLD-1, HCT116 and HT29. Expression of cells treated with 5 μM 5-Azacytidine (DAC) were compared to identical cell lines not treated with this reagent using a standard protocol and hybridization to Affymetrix HGU133A chips.

[0161] Analysis strategy:

[0162] A. The datasets containing information on around 23.000 genes were copied from the data archive on the ‘Methalyzer’ to a newly created directory.

[0163] B. The needed details on the Affymetrix HGU133A chip were downloaded to the data analysis area of ‘Methalyzer’

[0164] C. The needed analysis tools (specific ‘R’ libraries for the bioconductor package) updated

[0165] D. To estimate the raw data quality, two graphical overviews were created:
[0166] a. Intensity plots for each chip on its own
[0167] b. RNA degradation plot

[0168] E. Data sets were normalized together using the tool called ‘expresso’ applying the following parameters:
[0169] a. Background correction: Mas
[0170] b. Normalization: quantiles
[0171] c. PM correction: Mas
[0172] d. Expression: Mas

[0173] F. The result of the normalization was tested using a boxplot which displayed the intensity level calculated for each gene present on the chip.

[0174] G. ‘P’ (present) ‘M’, (marginal) and ‘A’ (absent) calls made available by the MAS5 algorithm (Affymetrix software) for each gene and each experiment were collected and transferred to an Excel sheet.

[0175] H. Using MS Excel, ‘P’ and ‘A’ calls were converted into an ‘Expression Score’ using the following rules:
[0176] a. ‘P’ in the DAC treatment data sets got a score of 1
[0177] b. ‘A’ in the non-treatment data sets got a score of 1

[0178] I. For each gene, the Expression Score was calculated

[0179] J. A cut-off of 4 was defined as the first minimal criterion a gene had to fulfill

[0180] K. As certain genes are present more than once on the chips used, a Perl script was created which allowed to link the probe set name on the chip and the corresponding RefSeq ID.

[0181] L. The list of genes was restructured in such a way that each probe set was described in one row

[0182] M. The table was transferred into a purpose built MS Access database

[0183] N. A table containing the Methascores 2.2 of all described genes was added to the database system

[0184] O. The following filtering rules were applied to the dataset
[0185] a. X-chromosomal genes were excluded
[0186] b. Expression of the genes was ranked descending
[0187] c. Methascore 2.2 had to be >3 and the number of different patterns per gene had to be >3

[0188] Reactivated genes are shown in Table 7.

### EXAMPLE 4

### Methylation for Cervix Cancer

[0189] Data were collected during re-expression experiments of the four cell lines Hela, Siha, CSCC7 and CSCC8. The cell lines were treated with three different concentrations of 5-Azacytidine (DAC; 0.2 μM, 1 μM, 5 μM) using otherwise identical experimental conditions.

[0190] Analysis strategy:

[0191] A. The datasets containing information on around 54.000 genes were copied from the data archive on the ‘Methalyzer’ to a newly created directory.

[0192] B. The needed details on the Affymetrix HGU133Aplus2.0 chip were downloaded to the data analysis area of ‘Methalyzer’

[0193] C. The needed analysis tools (specific ‘R’ libraries for the bioconductor package) updated

[0194] D. To estimate the raw data quality, two graphical overviews were created:
[0195] a. Intensity plots for each chip on its own
[0196] b. RNA degradation plot

[0197] E. Data sets were normalized together using the tool called ‘expresso’ applying the following parameters:
[0198] a. Background correction: Mas
[0199] b. Normalization: quantiles
[0200] c. PM correction: Mas
[0201] d. Expression: Mas

[0202] F. The result of the normalization was tested using a boxplot which displayed the intensity level calculated for each gene present on the chip.

[0203] G. ‘P’ (present) ‘M’, (marginal) and ‘A’ (absent) calls made available by the MAS5 algorithm (Affymetrix software) for each gene and each experiment were collected and transferred to an Excel sheet.

[0204] H. Using MS Excel, ‘P’ and ‘A’ calls were converted into an ‘Expression Score’ using the following rules:
[0205] a. ‘P’ in the DAC treatment data sets got a score of 1
[0206] b. ‘A’ in the non-treatment data sets got a score of 1

[0207] I. For each gene and condition, the Expression Score was calculated

[0208] J. Lists were sorted based on a minimal expression score which was identical to the number of chips available for each condition

[0209] K. The Methascore cut-off was set to >3 in all data sets

[0210] L. Lists were created detailing the conditions used and the markers selected

[0211] M. A summary was created which contained a condensed representation of the findings including an overview on which markers occurred under which condition.

[0212] Reactivated genes are shown in Table 8.

### EXAMPLE 5

### Methylation for Breast Cancer

[0213] Data were collected during a re-expression experiment using the breast cancer cell lines BT-20, MCF-7, MDA-MB 231 and MDA-MB 436. Expression levels of cells treated with 5 μM 5-Azacytidine (DAC; in acetic acid; were compared to identical cell lines not treated with this reagent (PBS as replacement) using an Affymetrix HGU133A chip.

[0214] Analysis strategy:

[0215] A. The datasets containing information on around 23.000 genes were copied from the data archive on the ‘Methalyzer’ to a newly created directory.

[0216] B. The needed details on the Affymetrix HGU133A chip were downloaded to the data analysis area of ‘Methalyzer’

[0217] C. The needed analysis tools (specific ‘R’ libraries for the bioconductor package) updated

[0218] D. To estimate the raw data quality, two graphical overviews were created:
[0219] a. Intensity plots for each chip on its own
[0220] b. RNA degradation plot

[0221] E. Data sets were normalized together using the tool called ‘expresso’ applying the following parameters:
[0222] a. Background correction: Mas
[0223] b. Normalization: quantiles
[0224] c. PM correction: Mas
[0225] d. Expression: Mas

[0226] F. The result of the normalization was tested using a boxplot which displayed the intensity level calculated for each gene present on the chip.

[0227] G. ‘P’ (present) ‘M’, (marginal) and ‘A’ (absent) calls made available by the MAS5 algorithm (Affymetrix software) for each gene and each experiment were collected and transferred to an Excel sheet.

[0228] H. Using MS Excel, ‘P’ and ‘A’ calls were converted into an ‘Expression Score’ using the following rules:
[0229] a. ‘P’ in the DAC treatment data sets got a score of 1
[0230] b. ‘A’ in the non-treatment data sets got a score of 1

[0231] I. For each gene, the Expression Score was calculated

[0232] J. A cut-off of 4 was defined as the first minimal criterion a gene had to fulfill

[0233] K. As certain genes are present more than once on the chips used, a Perl script was created which allowed to link the probe set name on the chip and the corresponding RefSeq ID.

[0234] L. The list of genes was restructured in such a way that each probe set was described in one row

[0235] M. The table was transferred into a purpose built MS Access database

[0236] N. A table containing the Methascores 2.2 of all described genes was added to the database system

[0237] O. The following filtering rules were applied to the dataset
[0238] a. X-chromosomal genes were excluded
[0239] b. Expression scores were ranked descending and a cut-off of >4 was set
[0240] c. Methascore 2.2 cut-off was set to >3

[0241] Reactivated genes identified for breast are shown in Table 6.

### EXAMPLE 6

### Cervical cancer

[0242] Three markers (CCNA1, NPTX1 and CACNA1C) were analyzed with Methylation Specific PCR in patient samples:
[0243] CCNA1 and NPTX1 discriminate between cancers and normal cervixes (see FIG. 1).
[0244] CACNA1C→inadequate marker (methylated in cancers as well as in normal cervixes)

[0245] For the other markers direct bisulfite sequencing (BSP) was performed on DNA derived from cervix samples from subjects without (normals) and with cervical cancer. Until now one (1) of the 24 tested markers showed methylation in the DNA from normals, 12 were unmethylated, 3 were almost completely unmethylated with the exception of one CG site and 8 were mostly unmethylated but showed methylation in more than 1 CG site.

[0246] For 12 markers BSP results are available in cancer tissues: 10 of these contain methylated cytosines. The markers TFPI2, ARMC7, TRM_HUMAN, OGDHL, PTGS2, GPR39, C13ORF18, ASMTL and DLL4 show differential methylation between the normals and the cancers cases.

### EXAMPLE 7

### Prostate Cancer

[0247] The methylation status of 47 genes was considered in the prostate cancer cell lines 22rv1; DU145; LNACAP and PC3. Markers CDH1, PTGS2, TWIST1, EDNRB, RUNX3, RARB, FANCF, FHIT and NMU have been reported previously to be methylated in prostate tissue or other tissue types. GLDC, RPS28, PODXL, ARIH2, ANAPC2, ARMC8, CSTF2T, POLA, FLJ10983, ZNF398, CBLL1, HSPB6, NF1, CEBPD, ARL4A, ARTS-1, ETFDH, PGEA1, HPN and WDR45 were found to be unmethylated in prostate cell lines.

[0248] Sixteen out of 47 genes were shown to be methylated in at least some of the prostate cell lines by way of direct bisulfite sequencing. Genes NDP, CD3D, APOC1, NBL1, MCAM, ING4, LEF1, CENTD3, MGC15396 were methylated in all four cancer cell lines. FKBP4 was methylated in cell lines 22rv1, LNCaP and PC3; PLTP was methylated in cell lines 22rv1, LNCaP and PC3; genes ATXN1 and TFAP2A were methylated in cell lines DU145 and LNCaP; ENPEP was methylated in cell lines DU145 and PC3; SSBP2 was methylated in cell lines LNCaP and PC3 and gene BMP2 was methylated in cell line DU145. For other markers the methylation status was tested by way of MSP. FIG. 2A visualizes the result obtained for the CEBPC and PODXL genes in the different cell lines by way of MSP.

[0249] The methylation status of the 16 genes was further tested in primary human prostate tissue and compared to their methylation status in normal prostate tissue from a non-prostate cancer patient. The markers BMP2, ENPEP, MCAM, SSBP2 and NDP show differential methylation between the normal prostate tissues and prostate cancer tissue or/and benign prostate hyperplasia.

### EXAMPLE 8

### Lung Cancer

[0250] The methylation status of 30 genes was considered in 15 lung adenoma-carcinoma/cancer cell lines by way of direct bisulfite sequencing or MSP. The Methprimer primer program was used to position the CpG island on the input sequence and to design primers.

[0251] A total of 18 out of the 30 genes appeared to be unmethylated at the first CPG island (BS1) in the cell lines tested, whereas twelve out of 30 genes were methylated at BS1 in at least some of the lung cell lines. No CpG islands could be identified in the FMO4 gene

[0252] Genes found to be unmethylated at BS1 were tested for their methylation status at subsequent CpG islands. One further gene, NISCH which was unmethylated at BS1 was found to be methylated at a further CpG island.

[0253] The genes evidenced to be be methylated in the tested cell lines, were further tested on methylation in 12 tumors and compared to 6 non-lung cancer patients. Table 18 indicates that markers PAK3, PIGH, TUBB4 and NISCH show differential methylation between the normals and the cancer cases.

### EXAMPLE 9

### Breast Cancer

[0254] Direct bisulfite sequencing or MSP was performed on DNA derived from different breast cancer cell lines (M12, BT20, M7, 231, 436 and HS578T). Genes BACH1, CKMT, GALE, HMG20B, KRT14, OGDHL, PON2, SESN1, KIF1A (kinesin family member 1A) and MAL (T cell proliferation protein) were methylated.

[0255] Among the listed genes in table 19, those indicated by gray were found to be unmethylated in the tested cell lines, or they were methylated breast cancer cell lines as well as in primary paired normals. Genes indicated by blancs are left to finish sequencing in paired normal and tumor tissues.

[0256] Genes which are non-methylated in nornals, but which are methylated in breast cancer tissue can be used for identifying or prognosis of breast cancer. In particular methylation markers for breast cancer are KIF1A (kinesin family member 1A), MAL (T cell proliferation protein).

### EXAMPLE 10

### Colon Cancer

[0257] Direct bisulfite sequencing or MSP was performed on DNA derived from colon cancer cell lines.

[0258] Bisulfite-sequencing. Bisulfite-modified genomic DNA was amplified by PCR using 10× buffer (166 mM (NH₄)₂SO₄, 670 mM Tris Buffer (pH 8.8), 67 mM MgCl₂, 0.7% 2-mercaptoethanol, 1% DMSO), cervix, and primer sets that were designed to recognize DNA alterations after bisulfite treatment. Primer sequences are shown in Table in the PPT file; PCR reaction was performed for 45 cycles of 96° C. for 1 min, 54° C. for 1 min, and 72° C. for 1 min. PCR products were gel-extracted (Qiagen, Valencia, Calif.) and sequenced using the ABI BigDye cycle sequencing kit (Applied Biosystems, Foster City, Calif.).

[0259] Conventional methylation-specific PCR (C-MSP). Bisulfite-treated DNA was amplified with either methylation-specific or unmethylation-specific primer sets by PCR using 10× buffer (166 mM (NH₄)₂SO₄, 670 mM Tris Buffer (pH 8.8), 67 mM MgCl₂, 0.7% 2-mercaptoethanol, 1% DMSO) supplemented with 1.5 μl of 50 mM MgSO₄ for RGL-1, 1 μl of 50 mM MgSO₄ for B4GAL1 and BAG-1. PCR reaction was performed for 35 cycles of 95° C. for 30 sec, 59° C. for 30 sec, and 72° C. for 30 sec in 25 μl of reaction volume.

[0260] All of the 36 genes B4GALT1, C10orf119, C10orf13, CBR1, COPS4, COVA1, CSRP1, DARS, DNAJC10, FKBP14, FN3KRP, GANAB, HUS1, KLF11, MRPL4, MYLK, NELF, NETO2, PAPSS2, RBMS2, RHOB, SECTM1, SIRT2, SIRT7, SLC35D1, SLC9A3R1, TTRAP, TUBG2, FLJ20277, MYBL2, GPRI16, OSMR, PC4, SLC39A4, UBE3A, PDLIM3 and UBE21 appeared to be methylated in the colon cancer cell lines. The methylation status of the DNAJC10 gene was not uniform.

[0261] 23 out of 26 genes were successfully sequenced in primary colon cancer tissues (Table 20). Differential methylation markers for colon cancer are GPR116, OSMR, PC4, SLC39A4, UBE23 and UBE21. Among 36 genes, 13 genes are left to finish sequencing in paired normal and tumor tissues.

[0262] Further CMSP and QMSP assays were performed on tissue samples with primers shown in Table 21. Tissue tested were paired normals (PN), paired colorectal cancers (PT), normal epithelial components (NN); inflammatory cells, stromal cells and normal colon epithelial cells. Results are shown in FIG. 3A-3F and differential methylation was observed in tissue for B4GALT1, OSMR, PAPSS2, TUBG2, NTRK2 and SFRP4.

### EXAMPLE 10

### Various Cancers

[0263] The methylation frequency of 8 potential methylation markers in different cancer types was investigated using primers given in Table 22. Results are summarized in Table 23 and FIG. 21A-21C. Methylation markers were retained based on absence of methylation in normal tissue (<10%) and a given sensitivity in tumors (>25%). This selection was complemented with markers passing the Fisher test (p<0.05).

[0264] Differential methylation was observed for:

[0265] PAK3 in lung, prostate, cervix and head and neck tumors;

[0266] NISCH in lung, gastric, kidney and head and neck tumors;

[0267] KIF1A in breast, pancreas, colon, cervix and head and neck tumors;

[0268] OGDHL in breast and colon tumors;

[0269] OSMR in colon and gastric tumors;

[0270] B4GALT1 in esophageal, lung, colon, prostate and bladder tumors;

[0271] MCAM in esophageal, prostate, thyroid and ovarian tumors;

[0272] SSBP2 in esophageal, colon, prostate, kidney and bladder tumors.

[0273] These data indicate that the above-listed markers can be used in any of the methods and kits disclosed in the specification for the Table 5 markers. Particularly, they can be used in any of the tumor types listed as demonstrating differential methylation.

### REFERENCES

[0274] The disclosure of each reference cited is expressly incorporated herein.

[0275] Reeves et al., U.S. Pat. No. 6,596,493

[0276] Sidransky, U.S. Pat. No. 6,025,127

[0277] Sidransky, U.S. Pat. No. 5,561,041

[0278] Nelson et al., U.S. Pat. No. 5,552,277

[0279] Herman, et al., U.S. Pat. No. 6,017,704

[0280] Baylin et al, U.S. Patent Application Publication No. 2003/0224040 A1

[0281] Belinsky et al., U.S. Patent Application Publication No. 2004/0038245 A1

[0282] Sidransky, U.S. Patent Application Publication No. 2003/0124600 A1

[0283] Sidransky, U.S. Patent Application Publication No. 2004/0081976 A1

[0284] Sukumar et al., U.S. Pat. No. 6,756,200 B2

[0285] Herman et al., U.S. Patent Application Publication No. 2002/0127572 A1

The application's sequence listing, which the Patent Office published only in electronic form, follows.

SEQUENCE LISTING (420 sequences)

SEQ ID NO: 1 - DNA, 10719 bp, Homo sapiens
tggagacagaatggaggtgctgccggactcggaaatggggtccaagggtagccaaggatggctgcagcttcatatgatcagttgttaaagcaagttgaggcactgaagatggagaactcaaatcttcgacaagagctagaagataattccaatcatcttacaaaactggaaactgaggcatctaatatgaaggaagtacttaaacaactacaaggaagtattgaagatgaagctatggcttcttctggacagattgatttattagagcgtcttaaagagcttaacttagatagcagtaatttccctggagtaaaactgcggtcaaaaatgtccctccgttcttatggaagccgggaaggatctgtatcaagccgttctggagagtgcagtcctgttcctatgggttcatttccaagaagagggtttgtaaatggaagcagagaaagtactggatatttagaagaacttgagaaagagaggtcattgcttcttgctgatcttgacaaagaagaaaaggaaaaagactggtattacgctcaacttcagaatctcactaaaagaatagatagtcttcctttaactgaaaatttttccttacaaacagatatgaccagaaggcaattggaatatgaagcaaggcaaatcagagttgcgatggaagaacaactaggtacctgccaggatatggaaaaacgagcacagcgaagaatagccagaattcagcaaatcgaaaaggacatacttcgtatacgacagcttttacagtcccaagcaacagaagcagagaggtcatctcagaacaagcatgaaaccggctcacatgatgctgagcggcagaatgaaggtcaaggagtgggagaaatcaacatggcaacttctggtaatggtcagggttcaactacacgaatggaccatgaaacagccagtgttttgagttctagtagcacacactctgcacctcgaaggctgacaagtcatctgggaaccaaggtggaaatggtgtattcattgttgtcaatgcttggtactcatgataaggatgatatgtcgcgaactttgctagctatgtctagctcccaagacagctgtatatccatgcgacagtctggatgtcttcctctcctcatccagcttttacatggcaatgacaaagactctgtattgttgggaaattcccggggcagtaaagaggctcgggccagggccagtgcagcactccacaacatcattcactcacagcctgatgacaagagaggcaggcgtgaaatccgagtccttcatcttttggaacagatacgcgcttactgtgaaacctgttgggagtggcaggaagctcatgaaccaggcatggaccaggacaaaaatccaatgccagctcctgttgaacatcagatctgtcctgctgtgtgtgttctaatgaaactttcatttgatgaagagcatagacatgcaatgaatgaactagggggactacaggccattgcagaattattgcaagtggactgtgaaatgtatgggcttactaatgaccactacagtattacactaagacgatatgctggaatggctttgacaaacttgacttttggagatgtagccaacaaggctacgctatgctctatgaaaggctgcatgagagcacttgtggcccaactaaaatctgaaagtgaagacttacagcaggttattgcgagtgttttgaggaatttgtcttggcgagcagatgtaaatagtaaaaagacgttgcgagaagttggaagtgtgaaagcattgatggaatgtgctttagaagttaaaaaggaatcaaccctcaaaagcgtattgagtgccttatggaatttgtcagcacattgcactgagaataaagctgatatatgtgctgtagatggtgcacttgcatttttggttggcactcttacttaccggagccagacaaacactttagccattattgaaagtggaggtgggatattacggaatgtgtccagcttgatagctacaaatgaggaccacaggcaaatcctaagagagaacaactgtctacaaactttattacaacacttaaaatctcatagtttgacaatagtcagtaatgcatgtggaactttgtggaatctctcagcaagaaatcctaaagaccaggaagcattatgggacatgggggcagttagcatgctcaagaacctcattcattcaaagcacaaaatgattgctatgggaagtgctgcagctttaaggaatctcatggcaaataggcctgcgaagtacaaggatgccaatattatgtctcctggctcaagcttgccatctcttcatgttaggaaacaaaaagccctagaagcagaattagatgctcagcacttatcagaaacttttgacaatatagacaatttaagtcccaaggcatctcatcgtagtaagcagagacacaagcaaagtctctatggtgattatgtttttgacaccaatcgacatgatgataataggtcagacaattttaatactggcaacatgactgtcctttcaccatatttgaatactacagtgttacccagctcctcttcatcaagaggaagcttagatagttctcgttctgaaaaagatagaagtttggagagagaacgcggaattggtctaggcaactaccatccagcaacagaaaatccaggaacttcttcaaagcgaggtttgcagatctccaccactgcagcccagattgccaaagtcatggaagaagtgtcagccattcatacctctcaggaagacagaagttctgggtctaccactgaattacattgtgtgacagatgagagaaatgcacttagaagaagctctgctgcccatacacattcaaacacttacaatttcactaagtcggaaaattcaaataggacatgttctatgccttatgccaaattagaatacaagagatcttcaaatgatagtttaaatagtgtcagtagtagtgatggttatggtaaaagaggtcaaatgaaaccctcgattgaatcctattctgaagatgatgaaagtaagttttgcagttatggtcaatacccagccgacctagcccataaaatacatagtgcaaatcatatggatgataatgatggagaactagatacaccaataaattatagtcttaaatattcagatgagcagttgaactctggaaggcaaagtccttcacagaatgaaagatgggcaagacccaaacacataatagaagatgaaataaaacaaagtgagcaaagacaatcaaggaatcaaagtacaacttatcctgtttatactgagagcactgatgataaacacctcaagttccaaccacattttggacagcaggaatgtgtttctccatacaggtcacggggagccaatggttcagaaacaaatcgagtgggttctaatcatggaattaatcaaaatgtaagccagtctttgtgtcaagaagatgactatgaagatgataagcctaccaattatagtgaacgttactctgaagaagaacagcatgaagaagaagagagaccaacaaattatagcataaaatataatgaagagaaacgtcatgtggatcagcctattgattatagtttaaaatatgccacagatattccttcatcacagaaacagtcattttcattctcaaagagttcatctggacaaagcagtaaaaccgaacatatgtcttcaagcagtgagaatacgtccacaccttcatctaatgccaagaggcagaatcagctccatccaagttctgcacagagtagaagtggtcagcctcaaaaggctgccacttgcaaagtttcttctattaaccaagaaacaatacagacttattgtgtagaagatactccaatatgtttttcaagatgtagttcattatcatctttgtcatcagctgaagatgaaataggatgtaatcagacgacacaggaagcagattctgctaataccctgcaaatagcagaaataaaagaaaagattggaactaggtcagctgaagatcctgtgagcgaagttccagcagtgtcacagcaccctagaaccaaatccagcagactgcagggttctagtttatcttcagaatcagccaggcacaaagctgttgaattttcttcaggagcgaaatctccctccaaaagtggtgctcagacacccaaaagtccacctgaacactatgttcaggagaccccactcatgtttagcagatgtacttctgtcagttcacttgatagttttgagagtcgttcgattgccagctccgttcagagtgaaccatgcagtggaatggtaagtggcattataagccccagtgatcttccagatagccctggacaaaccatgccaccaagcagaagtaaaacacctccaccacctcctcaaacagctcaaaccaagcgagaagtacctaaaaataaagcacctactgctgaaaagagagagagtggacctaagcaagctgcagtaaatgctgcagttcagagggtccaggttcttccagatgctgatactttattacattttgccacggaaagtactccagatggattttcttgttcatccagcctgagtgctctgagcctcgatgagccatttatacagaaagatgtggaattaagaataatgcctccagttcaggaaaatgacaatgggaatgaaacagaatcagagcagcctaaagaatcaaatgaaaaccaagagaaagaggcagaaaaaactattgattctgaaaaggacctattagatgattcagatgatgatgatattgaaatactagaagaatgtattatttctgccatgccaacaaagtcatcacgtaaagcaaaaaagccagcccagactgcttcaaaattacctccacctgtggcaaggaaaccaagtcagctgcctgtgtacaaacttctaccatcacaaaacaggttgcaaccccaaaagcatgttagttttacaccgggggatgatatgccacgggtgtattgtgttgaagggacacctataaacttttccacagctacatctctaagtgatctaacaatcgaatcccctccaaatgagttagctgctggagaaggagttagaggaggggcacagtcaggtgaatttgaaaaacgagataccattcctacagaaggcagaagtacagatgaggctcaaggaggaaaaacctcatctgtaaccatacctgaattggatgacaataaagcagaggaaggtgatattcttgcagaatgcattaattctgctatgcccaaagggaaaagtcacaagcctttccgtgtgaaaaagataatggaccaggtccagcaagcatctgcgtcttcttctgcacccaacaaaaatcagttagatggtaagaaaaagaaaccaacttcaccagtaaaacctataccacaaaatactgaatataggacacgtgtaagaaaaaatgcagactcaaaaaataatttaaatgctgagagagttttctcagacaacaaagattcaaagaaacagaatttgaaaaataattccaaggtcttcaatgataagctcccaaataatgaagatagagtcagaggaagttttgcttttgattcacctcatcattacacgcctattgaaggaactccttactgtttttcacgaaatgattctttgagttctctagattttgatgatgatgatgttgacctttccagggaaaaggctgaattaagaaaggcaaaagaaaataaggaatcagaggctaaagttaccagccacacagaactaacctccaaccaacaatcagctaataagacacaagctattgcaaagcagccaataaatcgaggtcagcctaaacccatacttcagaaacaatccacttttccccagtcatccaaagacataccagacagaggggcagcaactgatgaaaagttacagaattttgctattgaaaatactccggtttgcttttctcataattcctctctgagttctctcagtgacattgaccaagaaaacaacaataaagaaaatgaacctatcaaagagactgagccccctgactcacagggagaaccaagtaaacctcaagcatcaggctatgctcctaaatcatttcatgttgaagataccccagtttgtttctcaagaaacagttctctcagttctcttagtattgactctgaagatgacctgttgcaggaatgtataagctccgcaatgccaaaaaagaaaaagccttcaagactcaagggtgataatgaaaaacatagtcccagaaatatgggtggcatattaggtgaagatctgacacttgatttgaaagatatacagagaccagattcagaacatggtctatcccctgattcagaaaattttgattggaaagctattcaggaaggtgcaaattccatagtaagtagtttacatcaagctgctgctgctgcatgtttatctagacaagcttcgtctgattcagattccatcctttccctgaaatcaggaatctctctgggatcaccatttcatcttacacctgatcaagaagaaaaaccctttacaagtaataaaggcccacgaattctaaaaccaggggagaaaagtacattggaaactaaaaagatagaatctgaaagtaaaggaatcaaaggaggaaaaaaagtttataaaagtttgattactggaaaagttcgatctaattcagaaatttcaggccaaatgaaacagccccttcaagcaaacatgccttcaatctctcgaggcaggacaatgattcatattccaggagttcgaaatagctcctcaagtacaagtcctgtttctaaaaaaggcccaccccttaagactccagcctccaaaagccctagtgaaggtcaaacagccaccacttctcctagaggagccaagccatctgtgaaatcagaattaagccctgttgccaggcagacatcccaaataggtgggtcaagtaaagcaccttctagatcaggatctagagattcgaccccttcaagacctgcccagcaaccattaagtagacctatacagtctcctggccgaaactcaatttcccctggtagaaatggaataagtcctcctaacaaattatctcaacttccaaggacatcatcccctagtactgcttcaactaagtcctcaggttctggaaaaatgtcatatacatctccaggtagacagatgagccaacagaaccttaccaaacaaacaggtttatccaagaatgccagtagtattccaagaagtgagtctgcctccaaaggactaaatcagatgaataatggtaatggagccaataaaaaggtagaactttctagaatgtcttcaactaaatcaagtggaagtgaatctgatagatcagaaagacctgtattagtacgccagtcaactttcatcaaagaagctccaagcccaaccttaagaagaaaattggaggaatctgcttcatttgaatctctttctccatcatctagaccagcttctcccactaggtcccaggcacaaactccagttttaagtccttcccttcctgatatgtctctatccacacattcgtctgttcaggctggtggatggcgaaaactcccacctaatctcagtcccactatagagtataatgatggaagaccagcaaagcgccatgatattgcacggtctcattctgaaagtccttctagacttccaatcaataggtcaggaacctggaaacgtgagcacagcaaacattcatcatcccttcctcgagtaagcacttggagaagaactggaagttcatcttcaattctttctgcttcatcagaatccagtgaaaaagcaaaaagtgaggatgaaaaacatgtgaactctatttcaggaaccaaacaaagtaaagaaaaccaagtatccgcaaaaggaacatggagaaaaataaaagaaaatgaattttctcccacaaatagtacttctcagaccgtttcctcaggtgctacaaatggtgctgaatcaaagactctaatttatcaaatggcacctgctgtttctaaaacagaggatgtttgggtgagaattgaggactgtcccattaacaatcctagatctggaagatctcccacaggtaatactcccccggtgattgacagtgtttcagaaaaggcaaatccaaacattaaagattcaaaagataatcaggcaaaacaaaatgtgggtaatggcagtgttcccatgcgtaccgtgggtttggaaaatcgcctgaactcctttattcaggtggatgcccctgaccaaaaaggaactgagataaaaccaggacaaaataatcctgtccctgtatcagagactaatgaaagttctatagtggaacgtaccccattcagttctagcagctcaagcaaacacagttcacctagtgggactgttgctgccagagtgactccttttaattacaacccaagccctaggaaaagcagcgcagatagcacttcagctcggccatctcagatcccaactccagtgaataacaacacaaagaagcgagattccaaaactgacagcacagaatccagtggaacccaaagtcctaagcgccattctgggtcttaccttgtgacatctgtttaaaagagaggaagaatgaaactaagaaaattctatgttaattacaactgctatatagacattttgtttcaaatgaaactttaaaagactgaaaaattttgtaaataggtttgattcttgttagagggtttttgttctggaagccatatttgatagtatactttgtcttcactggtcttattttgggaggcactcttgatggttaggaaaaaaatagtaaagccaagtatgtttgtacagtatgttttacatgtatttaaagtagcatcccatcccaacttcctttaattattgcttgtcttaaaataatgaacactacagatagaaaatatgatatattgctgttatcaatcatttctagattataaactgactaaacttacatcagggaaaaattggtatttatgcaaaaaaaaatgtttttgtccttgtgagtccatctaacatcataattaatcatgtggctgtgaaattcacagtaatatggttcccgatgaacaagtttacccagcctgctttgctttactgcatgaatgaaactgatggttcaatttcagaagtaatgattaacagttatgtggtcacatgatgtgcatagagatagctacagtgtaataatttacactattttgtgctccaaacaaaacaaaaatctgtgtaactgtaaaacattgaatgaaactattttacctgaactagattttatctgaaagtaggtagaatttttgctatgctgtaatttgttgtatattctggtatttgaggtgagatggctgctcttttattaatgagacatgaattgtgtctcaacagaaactaaatgaacatttcagaataaattattgctgtatgtaaactgttactgaaattggtatttgtttgaagggtcttgtttcacatttgtattaataattgtttaaaatgcctcttttaaaagcttatataaatttttttcttcagcttctatgcattaagagtaaaattcctcttactgtaataaaaacaattgaagaagactgttgccacttaaccattccatgcgttggcacttatctattcctgaaatttcttttatgtgattagctcatcttgatttttaatatttttccacttaaacttttttttcttactccactggagctcagtaaaagtaaattcatgtaatagcaatgcaagcagcctagcacagactaagcattgagcataataggcccacataatttcctctttcttaatattatagaattctgtacttgaaattgattcttagacattgcagtctcttcgaggctttacagtgtaaactgtcttgccccttcatcttcttgttgcaactgggtctgacatgaacactttttatcaccctgtatgttagggcaagatctcagcagtgaagtataatcagcactttgccatgctcagaaaattcaaatcacatggaactttagaggtagatttaatacgattaagatattcagaagtatattttagaatccctgcctgttaaggaaactttatttgtggtaggtacagttctggggtacatgttaagtgtccccttatacagtggagggaagtcttccttcctgaaggaaaataaactgacacttattaactaagataatttacttaatatatcttccctgatttgttttaaaagatcagagggtgactgatgatacatgcatacatatttgttgaataaatgaaaatttatttttagtgataagattcatacactctgtatttggggagggaaaacctttttaagcatggtggggcactcagataggagtgaatacacctacctggtgccttgaaaatcacatcaagtagttaattatctaccccttacctgtgtttataacttccaggtaatgagaatgattttttttaaagctaaaatgccagtaaataaaagtgctatgacttgagctaagatatttgactccaatgcctgtactgtgtctactgcaccactttgtaaacacttcaatttactatctttgaaatgattgacctttaaatttttgccaaatgttatctgaaattgtctatgaataccatctacttctgttgttttcccaggcttccataaacaatggagatacatgcaaaaaaaaaaaaaaaaaa

SEQ ID NO: 2 - DNA, 4286 bp, Homo sapiens
gagacattccggtgggggactctggccagcccgagcaacgtggatcctgagagcactcccaggtaggcatttgccccggtgggacgccttgccagagcagtgtgtggcaggcccccgtggaggatcaacacagtggctgaacactgggaaggaactggtacttggagtctggacatctgaaacttggctctgaaactgcgcagcggccaccggacgccttctggagcaggtagcagcatgcagccgcctccaagtctgtgcggacgcgccctggttgcgctggttcttgcctgcggcctgtcgcggatctggggagaggagagaggcttcccgcctgacagggccactccgcttttgcaaaccgcagagataatgacgccacccactaagaccttatggcccaagggttccaacgccagtctggcgcggtcgttggcacctgcggaggtgcctaaaggagacaggacggcaggatctccgccacgcaccatctcccctcccccgtgccaaggacccatcgagatcaaggagactttcaaatacatcaacacggttgtgtcctgccttgtgttcgtgctggggatcatcgggaactccacacttctgagaattatctacaagaacaagtgcatgcgaaacggtcccaatatcttgatcgccagcttggctctgggagacctgctgcacatcgtcattgacatccctatcaatgtctacaagctgctggcagaggactggccatttggagctgagatgtgtaagctggtgcctttcatacagaaagcctccgtgggaatcactgtgctgagtctatgtgctctgagtattgacagatatcgagctgttgcttcttggagtagaattaaaggaattggggttccaaaatggacagcagtagaaattgttttgatttgggtggtctctgtggttctggctgtccctgaagccataggttttgatataattacgatggactacaaaggaagttatctgcgaatctgcttgcttcatcccgttcagaagacagctttcatgcagttttacaagacagcaaaagattggtggctgttcagtttctatttctgcttgccattggccatcactgcatttttttatacactaatgacctgtgaaatgttgagaaagaaaagtggcatgcagattgctttaaatgatcacctaaagcagagacgggaagtggccaaaaccgtcttttgcctggtccttgtctttgccctctgctggcttccccttcacctcagcaggattctgaagctcactctttataatcagaatgatcccaatagatgtgaacttttgagctttctgttggtattggactatattggtatcaacatggcttcactgaattcctgcattaacccaattgctctgtatttggtgagcaaaagattcaaaaactgctttaagtcatgcttatgctgctggtgccagtcatttgaagaaaaacagtccttggaggaaaagcagtcgtgcttaaagttcaaagctaatgatcacggatatgacaacttccgttccagtaataaatacagctcatcttgaaagaagaactattcactgtatttcattttctttatattggaccgaagtcattaaaacaaaatgaaacatttgccaaaacaaaacaaaaaactatgtatttgcacagcacactattaaaatattaagtgtaattattttaacactcacagctacatatgacattttatgagctgtttacggcatggaaagaaaatcagtgggaattaagaaagcctcgtcgtgaaagcacttaattttttacagttagcacttcaacatagctcttaacaacttccaggatattcacacaacacttaggcttaaaaatgagctcactcagaatttctattctttctaaaaagagatttatttttaaatcaatgggactctgatataaaggaagaataagtcactgtaaaacagaacttttaaatgaagcttaaattactcaatttaaaattttaaaatcctttaaaacaacttttcaattaatattatcacactattatcagattgtaattagatgcaaatgagagagcagtttagttgttgcatttttcggacactggaaacatttaaatgatcaggagggagtaacagaaagagcaaggctgtttttgaaaatcattacactttcactagaagcccaaacctcagcattctgcaatatgtaaccaacatgtcacaaacaagcagcatgtaacagactggcacatgtgccagctgaatttaaaatataatacttttaaaaagaaaattattacatcctttacattcagttaagatcaaacctcacaaagagaaatagaatgtttgaaaggctatcccaaaagacttttttgaatctgtcattcacataccctgtgaagacaatactatctacaattttttcaggattattaaaatcttcttttttcactatcgtagcttaaactctgtttggttttgtcatctgtaaatacttacctacatacactgcatgtagatgattaaatgagggcaggccctgtgctcatagctttacgatggagagatgccagtgacctcataataaagactgtgaactgcctggtgcagtgtccacatgacaaaggggcaggtagcaccctctctcacccatgctgtggttaaaatggtttctagcatatgtataatgctatagttaaaatactatttttcaaaatcatacagattagtacatttaacagctacctgtaaagcttattactaatttttgtattatttttgtaaatagccaatagaaaagtttgcttgacatggtgcttttctttcatctagaggcaaaactgctttttgagaccgtaagaacctcttagctttgtgcgttcctgcctaatttttatatcttctaagcaaagtgccttaggatagcttgggatgagatgtgtgtgaaagtatgtacaagagaaaacggaagagagaggaaatgaggtggggttggaggaaacccatggggacagattcccattcttagcctaacgttcgtcattgcctcgtcacatcaatgcaaaaggtcctgattttgttccagcaaaacacagtgcaatgttctcagagtgactttcgaaataaattgggcccaagagctttaactcggtcttaaaatatgcccaaatttttactttgtttttcttttaataggctgggccacatgttggaaataagctagtaatgttgttttctgtcaatattgaatgtgatggtacagtaaaccaaaacccaacaatgtggccagaaagaaagagcaataataattaattcacacaccatatggattctatttataaatcacccacaaacttgttctttaatttcatcccaatcactttttcagaggcctgttatcatagaagtcattttagactctcaattttaaattaattttgaatcactaatattttcacagtttattaatatatttaatttctatttaaattttagattatttttattaccatgtactgaatttttacatcctgataccctttccttctccatgtcagtatcatgttctctaattatcttgccaaattttgaaactacacacaaaaagcatacttgcattatttataataaaattgcattcagtggctttttaaaaaaaatgtttgattcaaaactttaacatactgataagtaagaaacaattataatttctttacatactcaaaaccaagatagaaaaaggtgctatcgttcaacttcaaaacatgtttcctagtattaaggactttaatatagcaacagacaaaattattgttaacatggatgttacagctcaaaagatttataaaagattttaacctattttctcccttattatccactgctaatgtggatgtatgttcaaacaccttttagtattgatagcttacatatggccaaaggaatacagtttatagcaaaacatgggtatgctgtagctaactttataaaagtgtaatataacaatgtaaaaaattatatatctgggaggattttttggttgcctaaagtggctatagttactgattttttattatgtaagcaaaaccaataaaaatttaagtttttttaacaactaccttatttttcactgtacagacactaattcattaaatactaattgattgtttaaaagaaatataaatgtgacaagtggacattatttatgttaaatatacaattatcaagcaagtatgaagttattcaattaaaatgccacatttctggtctctggg

SEQ ID NO: 3 - DNA, 2751 bp, Homo sapiens
gggagcttccggattgagccggaagtccccccagagcggatgccgcggcgggcctgtgggagcggggtcatcttctctctgctgctgtagctgccatgggcaaaagagaccgagcggaccgcgacaagaagaaatccaggaagcggcactatgaggatgaagaggatgatgaagaggacgccccggggaacgaccctcaggaagcggttccctcggcggcggggaagcaggtggatgagtcaggcaccaaagtggatgaatatggagccaaggactacaggctgcaaatgccgctgaaggacgaccacacctccaggcccctctgggtggctcccgatggccatatcttcttggaagccttctctccagtttacaaatatgcccaagacttcttggtggctattgcagagccagtgtgccgaccaacccatgtgcatgagtacaaactaactgcctactccttgtatgcagctgtcagcgttgggctgcaaaccagtgacatcaccgagtacctcaggaagctcagcaagactggagtccctgatggaattatgcagtttattaagttgtgtactgtcagctatggaaaagtcaagctggtcttgaagcacaacagatacttcgttgaaagttgccaccctgatgtaatccagcatcttctccaggaccccgtgatccgagaatgccgcttaagaaactctgaaggggaggccactgagctcatcacagagactttcacaagcaaatctgccatttctaagactgctgaaagcagtggtgggccctccacttcccgagtgacagatccacagggtaaatctgacatccccatggacctgtttgacttctatgagcaaatggacaaggatgaagaagaagaagaagagacacagacagtgtcttttgaagtcaagcaggaaatgattgaggaactccagaaacgttgcatccacctggagtaccctctgttggcagaatatgacttccggaatgattctgtcaaccctgatatcaacattgacctaaagcccacagctgtcctcagaccctatcaggagaagagcttgcgaaagatgtttggaaacgggcgtgcacgttcgggggtcattgttcttccctgcggtgctggaaagtccctggttggtgtgactgctgcatgcactgtcagaaaacgctgtctggtgctgggcaactcagctgtttctgtggagcagtggaaagcccagttcaagatgtggtccaccattgacgacagccagatctgccggttcacctccgatgccaaggacaagcccatcggctgctccgttgccattagcacctactccatgctgggccacaccaccaaaaggtcctgggaggccgagcgagtcatggagtggctcaagacccaggagtggggcctcatgatcctggatgaagtgcacaccataccagccaagatgttccgaagggtgctcaccatcgtgcaggcccactgtaagctgggtttgactgcgaccctcgtccgcgaagatgacaaaattgtggatttaaattttctgattgggcctaagctctacgaagccaactggatggagctgcagaataatggctacatcgccaaagtccagtgtgctgaggtctggtgccctatgtctcctgaattttaccgggaatatgtggcaatcaaaaccaagaaacgaatcttgctgtacaccatgaaccccaacaaatttagagcttgccagtttctgatcaagtttcatgaaaggaggaatgacaagattattgtctttgctgacaatgtgtttgccctaaaggaatatgccattcgactgaacaaaccctatatctacggacctacgtctcagggggaaaggatgcaaattctccagaatttcaagcacaaccccaaaattaacaccatcttcatatccaaggtaggtgacacttcgtttgatctgccggaagcaaatgtcctcattcagatctcatcccatggtggctccaggcgtcaggaagcccaaaggctagggcgggtgcttcgagctaaaaaagggatggttgcagaagagtacaatgcctttttctactcactggtatcccaggacacacaggaaatggcttactcaaccaagcggcagagattcttggtagatcaaggttatagcttcaaggtgatcacgaaactcgctggcatggaggaggaagacttggcgttttcgacaaaagaagagcaacagcagctcttacagaaagtcctggcagccactgacctggatgccgaggaggaggtggtggctggggaatttggctccagatccagccaggcatctcggcgctttggcaccatgagttctatgtctggggccgacgacactgtgtacatggagtaccactcatcgcggagcaaggcgcccagcaaacatgtacacccgctcttcaagcgctttaggaaatgatgcttaggcagggtacttcgttcaagaccggcgcttggcacccttgttggaaagggattttcagcataacattttccttccacctctttgaccttccctccagcgttggccaaattgtgctgaggaagatgcatcaagggcttggctgtgccttcataggtcatctagggttttataaaggaggaggagacaatattttttcaaactttttggggagtggggtcatttctgtatataaaaaatgttaatatttaaggtgtatttatgttaccgttctgaataaacagaatggaccattgaaccagta

SEQ ID NO: 4 - DNA, 3783 bp, Homo sapiens
cccgcgagcgtccatccatctgtccggccgactgtccagcgaaaggggctccaggccgggcgcacgtcgacccgggggaccgaggccaggagaggggccaagagcgcggctgacccttgcgggccggggcaggggacggtggccgcggccatgcagtcctgtgccagggcgtgggggctgcgcctgggccgcggggtcgggggcggccgccgcctggctgggggatcggggccgtgctgggcgccgcggagccgggacagcagcagtggcggcggggacagcgccgcggctggggcctcgcgcctcctggagcgccttctgcccagacacgacgacttcgctcggaggcacatcggccctggggacaaagaccagagagagatgctgcagaccttggggctggcgagcattgatgaattgatcgagaagacggtccctgccaacatccgtttgaaaagacccttgaaaatggaagaccctgtttgtgaaaatgaaatccttgcaactctgcatgccatttcaagcaaaaaccagatctggagatcgtatattggcatgggctattataactgctcagtgccacagacgattttgcggaacttactggagaactcaggatggatcacccagtatactccataccagcctgaggtgtctcaggggaggctggagagtttactcaactaccagaccatggtgtgtgacatcacaggcctggacatggccaatgcatccctgctggatgaggggactgcagccgcagaggcactgcagctgtgctacagacacaacaagaggaggaaatttctcgttgatccccgttgccacccacagacaatagctgttgtccagactcgagccaaatatactggagtcctcactgagctgaagttaccctgtgaaatggacttcagtggaaaagatgtcagtggagtgttgttccagtacccagacacggaggggaaggtggaagactttacggaactcgtggagagagctcatcagagtgggagcctggcctgctgtgctactgaccttttagctttgtgcatcttgaggccacctggagaatttggggtagacatcgccctgggcagctcccagagatttggagtgccactgggctatgggggaccccatgcagcattttttgctgtccgagaaagcttggtgagaatgatgcctggaagaatggtgggggtaacaagagatgccactgggaaagaagtgtatcgtcttgctcttcaaaccagggagcaacacattcggagagacaaggctaccagcaacatctgtacagctcaggccctcttggcgaatatggctgccatgtttcgaatctaccatggttcccatgggctggagcatattgctaggagggtacataatgccactttgattttgtcagaaggtctcaagcgagcagggcatcaactccagcatgacctgttctttgataccttgaagattcattgtggctgctcagtgaaggaggtcttgggcagggcggctcagcggcagatcaattttcggctttttgaggatggcacacttggtatttctcttgatgaaacagtcaatgaaaaagatctggacgatttgttgtggatctttggttgtgagtcatctgcagaactggttgctgaaagcatgggagaggagtgcagaggtattccagggtctgtgttcaagaggaccagcccgttcctcacccatcaagtgttcaacagctaccactctgaaacaaacattgtccggtacatgaagaaactggaaaataaagacatttcccttgttcacagcatgattccactgggatcctgcaccatgaaactgaacagttcgtctgaactcgcacctatcacatggaaagaatttgcaaacatccacccctttgtgcctctggatcaagctcaaggatatcagcagcttttccgagagcttgagaaggatttgtgtgaactcacaggttatgaccaggtctgtttccagccaaacagcggagcccagggagaatatgctggactggccactatccgagcctacttaaaccagaaaggagaggggcacagaacggtttgcctcattccgaaatcagcacatgggaccaacccagcaagtgcccacatggcaggcatgaagattcagcctgtggaggtggataaatatgggaatatcgatgcagttcacctcaaggccatggtggataagcacaaggagaacctagcagctatcatgattacatacccatccaccaatggggtgtttgaagagaacatcagtgacgtgtgtgacctcatccatcaacatggaggacaggtctacctagacggggcaaatatgaatgctcaggtgggaatctgtcgccctggagacttcgggtctgatgtctcgcacctaaatcttcacaagaccttctgcattccccacggaggaggtggtcctggcatggggcccatcggagtgaagaaacatctcgccccgtttttgcccaatcatcccgtcatttcactaaagcggaatgaggatgcctgtcctgtgggaaccgtcagtgcggccccatggggctccagttccatcttgcccatttcctgggcttatatcaagatgatgggaggcaagggtcttaaacaagccacggaaactgcgatattaaatgccaactacatggccaagcgattagaaacacactacagaattcttttcaggggtgcaagaggttatgtgggtcatgaatttattttggacacgagacccttcaaaaagtctgcaaatattgaggctgtggatgtggccaagagactccaggattatggatttcacgcccctaccatgtcctggcctgtggcagggaccctcatggtggagcccactgagtcggaggacaaggcagagctggacagattctgtgatgccatgatcagcattcggcaggaaattgctgacattgaggagggccgcatcgaccccagggtcaatccgctgaagatgtctccacactccctgacctgcgttacatcttcccactgggaccggccttattccagagaggtggcagcattcccactccccttcatgaaaccagagaacaaattctggccaacgattgcccggattgatgacatatatggagatcagcacctggtttgtacctgcccacccatggaagtttatgagtctccattttctgaacaaaagagggcgtcttcttagtcctctctccctaagtttaaaggactgatttgatgcctctccccagagcatttgataagcaagaaagatttcatctcccaccccagcctcaagtaggagttttatatactgtgtatatctctgtaatctctgtcaaggtaaatgtaaatacagtagctggagggagtcgaagctgatggttggaagacggatttgctttggtattctgcttccacatgtgccagttgcctggattgggagccattttgtgttttgcgtagaaagttttaggaactttaacttttaatgtggcaagtttgcagatgtcatagaggctatcctggagacttaatagacatttttttgttccaaaagagtccatgtggactgtgccatctgtgggaaatcccagggcaaatgtttacattttgtataccctgaagaactctttttcctctaatatgcctaatctgtaatcacatttctgagtgttttcctctttttctgtgtgaggttttttttttttttaatctgcatttattagtattctaataaaagcattttgatcggaaaaaaaaaaaaaaaaaaaaa

SEQ ID NO: 5 - DNA, 2963 bp, Homo sapiens
ccactgctgtcctcttcagctcaagatggtggcctgccgggcgattggcatcctcagccgcttttctgccttcaggatcctccgctcccgaggttatatatgccgcaattttacagggtcttctgctttgctgaccagaacccatattaactatggagtcaaaggggatgtggcagttgttcgaattaactctcccaattcaaaggtaaatacactgagtaaagagctacattcagagttctcagaagttatgaatgaaatctgggctagtgatcaaatcagaagtgccgtccttatctcatcaaagccaggctgctttattgcaggtgctgatatcaacatgttagccgcttgcaagacccttcaagaagtaacacagctatcacaagaagcacagagaatagttgagaaacttgaaaagtccacaaagcctattgtggctgccatcaatggatcctgcctgggaggaggacttgaggttgccatttcatgccaatacagaatagcaacaaaagacagaaaaacagtattaggtacccctgaagttttgctgggggccttaccaggagcaggaggcacacaaaggctgcccaaaatggtgggtgtgcctgctgctttggacatgatgctgactggtagaagcattcgtgcagacagggcaaagaaaatgggactggttgaccaactggtggaacccctgggaccaggactaaaacctccagaggaacggacaatagaatacctagaagaagttgcaattacttttgccaaaggactagctgataagaagatctctccaaagagagacaagggattggtggaaaaattgacagcgtatgccatgactattccatttgtcaggcaacaggtttacaaaaaagtggaagaaaaagtgcgaaagcagactaaaggcctttatcctgcacctctgaaaataattgatgtggtaaagactggaattgagcaagggagtgatgccggttatctctgtgaatctcagaaatttggagagcttgtaatgaccaaagaatcaaaggccttgatgggactctaccatggtcaggtcctgtgcaagaagaataaatttggagctccacagaaggatgttaagcatctggctattcttggtgcagggctgatgggagcaggcatcgcccaagtctccgtggataaggggctaaagactatacttaaagatgccaccctcactgcgctagaccgaggacagcaacaagtgttcaaaggattgaatgacaaagtgaagaagaaagctctaacatcatttgaaagggattccatcttcagcaacttgactgggcagcttgattaccaaggttttgaaaaggccgacatggtgattgaagctgtgtttgaggaccttagtcttaagcacagagtgctaaaggaagtagaagcggtgattccagatcactgtatctttgccagtaacacatctgctctcccaatcagtgaaatcgctgctgtcagcaaaagacctgagaaggtgattggcatgcactacttctctcccgtggacaagatgcagctgctggagattatcacgaccgagaaaacttccaaagacaccagtgcttcagctgtagcagttggtctcaagcaggggaaggtcatcattgtggttaaggatggacctggcttctatactaccaggtgtcttgcgcccatgatgtctgaagtcatccgaatcctccaggaaggagttgacccgaagaagctggattccctgaccacaagctttggctttcctgtgggtgccgccacactggtggatgaagttggtgtggatgtagcgaaacatgtggcggaagatctgggcaaagtctttggggagcggtttggaggtggaaacccagaactgctgacacagatggtgtccaagggcttcctaggtcgtaaatctgggaagggcttttacatctatcaggagggtgtgaagaggaaggatttgaattctgacatggatagtattttagcgagtctgaagctgcctcctaagtctgaagtctcatcagacgaagacatccagttccgcctggtgacaagatttgtgaatgaggcagtcatgtgcctgcaagaggggatcttggccacacctgcagagggagacatcggagccgtctttgggcttggcttcccgccttgtctgggagggcctttccgctttgtggatctgtatggcgcccagaagatagtggaccggctcaagaaatatgaagctgcctatggaaaacagttcaccccatgccagctgctagctgaccatgctaacagccctaacaagaagttctaccagtgagcaggcctcatgcctcgctcagtcagtgcactaaccccagctgccggcagtgctggttctccaacagagtggtgtctagatttatcagagtaacgagaagacaaactccggcactgggtttgctccctgattaaagtgccttcagccaagaccatctctccctcctggtgaagtgtgacttcgaattagtttgcacttcctattggaaggtagagcccactgctcattgtataagccccgaggcctagagtggcagccaagagccatctgaagccacctctctgcctgttcctcccaagaggccagggtggccaggggtggtgagggcagttctgcacccagccaaacacataacaataaaaaccaaactctgtgtcagcatctttgcccttctggtttaaacgcctccttcaaaaagcaatctggaagaaagccctgtgctttgggggagtaagaatgtgtgtgcagaattctaggcagcaccttagggagggactgggatgagagaaagtgggacctggtgggctcaaccacacacacctgtctgtgcagatgctttgcccaggcttctcaccacggtgtaccgggatattaaacctctttccccagcaaaaaaaaaaaaaaaaaaaaaaaaaaaaaaaaaaaa

SEQ ID NO: 6 - DNA, 6641 bp, Homo sapiens
gccctcgccgcccgcggcgccccgagcgctttgtgagcagatgcggagccgagtggagggcgcgagccagatgcggggcgacagctgacttgctgagaggaggcggggaggcgcggagcgcgcgtgtggtccttgcgccgctgacttctccactggttcctgggcaccgaaagataaacctctcataatgaaggcccccgctgtgcttgcacctggcatcctcgtgctcctgtttaccttggtgcagaggagcaatggggagtgtaaagaggcactagcaaagtccgagatgaatgtgaatatgaagtatcagcttcccaacttcaccgcggaaacacccatccagaatgtcattctacatgagcatcacattttccttggtgccactaactacatttatgttttaaatgaggaagaccttcagaaggttgctgagtacaagactgggcctgtgctggaacacccagattgtttcccatgtcaggactgcagcagcaaagccaatttatcaggaggtgtttggaaagataacatcaacatggctctagttgtcgacacctactatgatgatcaactcattagctgtggcagcgtcaacagagggacctgccagcgacatgtctttccccacaatcatactgctgacatacagtcggaggttcactgcatattctccccacagatagaagagcccagccagtgtcctgactgtgtggtgagcgccctgggagccaaagtcctttcatctgtaaaggaccggttcatcaacttctttgtaggcaataccataaattcttcttatttcccagatcatccattgcattcgatatcagtgagaaggctaaaggaaacgaaagatggttttatgtttttgacggaccagtcctacattgatgttttacctgagttcagagattcttaccccattaagtatgtccatgcctttgaaagcaacaattttatttacttcttgacggtccaaagggaaactctagatgctcagacttttcacacaagaataatcaggttctgttccataaactctggattgcattcctacatggaaatgcctctggagtgtattctcacagaaaagagaaaaaagagatccacaaagaaggaagtgtttaatatacttcaggctgcgtatgtcagcaagcctggggcccagcttgctagacaaataggagccagcctgaatgatgacattcttttcggggtgttcgcacaaagcaagccagattctgccgaaccaatggatcgatctgccatgtgtgcattccctatcaaatatgtcaacgacttcttcaacaagatcgtcaacaaaaacaatgtgagatgtctccagcatttttacggacccaatcatgagcactgctttaataggacacttctgagaaattcatcaggctgtgaagcgcgccgtgatgaatatcgaacagagtttaccacagctttgcagcgcgttgacttattcatgggtcaattcagcgaagtcctcttaacatctatatccaccttcattaaaggagacctcaccatagctaatcttgggacatcagagggtcgcttcatgcaggttgtggtttctcgatcaggaccatcaacccctcatgtgaattttctcctggactcccatccagtgtctccagaagtgattgtggagcatacattaaaccaaaatggctacacactggttatcactgggaagaagatcacgaagatcccattgaatggcttgggctgcagacatttccagtcctgcagtcaatgcctctctgccccaccctttgttcagtgtggctggtgccacgacaaatgtgtgcgatcggaggaatgcctgagcgggacatggactcaacagatctgtctgcctgcaatctacaaggttttcccaaatagtgcaccccttgaaggagggacaaggctgaccatatgtggctgggactttggatttcggaggaataataaatttgatttaaagaaaactagagttctccttggaaatgagagctgcaccttgactttaagtgagagcacgatgaatacattgaaatgcacagttggtcctgccatgaataagcatttcaatatgtccataattatttcaaatggccacgggacaacacaatacagtacattctcctatgtggatcctgtaataacaagtatttcgccgaaatacggtcctatggctggtggcactttacttactttaactggaaattacctaaacagtgggaattctagacacatttcaattggtggaaaaacatgtactttaaaaagtgtgtcaaacagtattcttgaatgttataccccagcccaaaccatttcaactgagtttgctgttaaattgaaaattgacttagccaaccgagagacaagcatcttcagttaccgtgaagatcccattgtctatgaaattcatccaaccaaatcttttattagtggtgggagcacaataacaggtgttgggaaaaacctgaattcagttagtgtcccgagaatggtcataaatgtgcatgaagcaggaaggaactttacagtggcatgtcaacatcgctctaattcagagataatctgttgtaccactccttccctgcaacagctgaatctgcaactccccctgaaaaccaaagcctttttcatgttagatgggatcctttccaaatactttgatctcatttatgtacataatcctgtgtttaagccttttgaaaagccagtgatgatctcaatgggcaatgaaaatgtactggaaattaagggaaatgatattgaccctgaagcagttaaaggtgaagtgttaaaagttggaaataagagctgtgagaatatacacttacattctgaagccgttttatgcacggtccccaatgacctgctgaaattgaacagcgagctaaatatagagtggaagcaagcaatttcttcaaccgtccttggaaaagtaatagttcaaccagatcagaatttcacaggattgattgctggtgttgtctcaatatcaacagcactgttattactacttgggtttttcctgtggctgaaaaagagaaagcaaattaaagatctgggcagtgaattagttcgctacgatgcaagagtacacactcctcatttggataggcttgtaagtgcccgaagtgtaagcccaactacagaaatggtttcaaatgaatctgtagactaccgagctacttttccagaagatcagtttcctaattcatctcagaacggttcatgccgacaagtgcagtatcctctgacagacatgtcccccatcctaactagtggggactctgatatatccagtccattactgcaaaatactgtccacattgacctcagtgctctaaatccagagctggtccaggcagtgcagcatgtagtgattgggcccagtagcctgattgtgcatttcaatgaagtcataggaagagggcattttggttgtgtatatcatgggactttgttggacaatgatggcaagaaaattcactgtgctgtgaaatccttgaacagaatcactgacataggagaagtttcccaatttctgaccgagggaatcatcatgaaagattttagtcatcccaatgtcctctcgctcctgggaatctgcctgcgaagtgaagggtctccgctggtggtcctaccatacatgaaacatggagatcttcgaaatttcattcgaaatgagactcataatccaactgtaaaagatcttattggctttggtcttcaagtagccaaaggcatgaaatatcttgcaagcaaaaagtttgtccacagagacttggctgcaagaaactgtatgctggatgaaaaattcacagtcaaggttgctgattttggtcttgccagagacatgtatgataaagaatactatagtgtacacaacaaaacaggtgcaaagctgccagtgaagtggatggctttggaaagtctgcaaactcaaaagtttaccaccaagtcagatgtgtggtcctttggcgtgctcctctgggagctgatgacaagaggagccccaccttatcctgacgtaaacacctttgatataactgtttacttgttgcaagggagaagactcctacaacccgaatactgcccagaccccttatatgaagtaatgctaaaatgctggcaccctaaagccgaaatgcgcccatccttttctgaactggtgtcccggatatcagcgatcttctctactttcattggggagcactatgtccatgtgaacgctacttatgtgaacgtaaaatgtgtcgctccgtatccttctctgttgtcatcagaagataacgctgatgatgaggtggacacacgaccagcctccttctgggagacatcatagtgctagtactatgtcaaagcaacagtccacactttgtccaatggttttttcactgcctgacctttaaaaggccatcgatattctttgctcttgccaaaattgcactattataggacttgtattgttatttaaattactggattctaaggaatttcttatctgacagagcatcagaaccagaggcttggtcccacaggccacggaccaatggcctgcagccgtgacaacactcctgtcatattggagtccaaaacttgaattctgggttgaattttttaaaaatcaggtaccacttgatttcatatgggaaattgaagcaggaaatattgagggcttcttgatcacagaaaactcagaagagatagtaatgctcaggacaggagcggcagccccagaacaggccactcatttagaattctagtgtttcaaaacacttttgtgtgttgtatggtcaataacatttttcattactgatggtgtcattcacccattaggtaaacattcccttttaaatgtttgtttgttttttgagacaggatctcactctgttgccagggctgtagtgcagtggtgtgatcatagctcactgcaacctccacctcccaggctcaagcctcccgaatagctgggactacaggcgcacaccaccatccccggctaatttttgtattttttgtagagacggggttttgccatgttgccaaggctggtttcaaactcctggactcaagaaatccacccacctcagcctcccaaagtgctaggattacaggcatgagccactgcgcccagcccttataaatttttgtatagacattcctttggttggaagaatatttataggcaatacagtcaaagtttcaaaatagcatcacacaaaacatgtttataaatgaacaggatgtaatgtacatagatgacattaagaaaatttgtatgaaataatttagtcatcatgaaatatttagttgtcatataaaaacccactgtttgagaatgatgctactctgatctaatgaatgtgaacatgtagatgttttgtgtgtatttttttaaatgaaaactcaaaataagacaagtaatttgttgataaatatttttaaagataactcagcatgtttgtaaagcaggatacattttactaaaaggttcattggttccaatcacagctcataggtagagcaaagaaagggtggatggattgaaaagattagcctctgtctcggtggcaggttcccacctcgcaagcaattggaaacaaaacttttggggagttttattttgcattagggtgtgttttatgttaagcaaaacatactttagaaacaaatgaaaaaggcaattgaaaatcccagctatttcacctagatggaatagccaccctgagcagaactttgtgatgcttcattctgtggaattttgtgcttgctactgtatagtgcatgtggtgtaggttactctaactggttttgtcgacgtaaacatttaaagtgttatattttttataaaaatgtttatttttaatgatatgagaaaaattttgttaggccacaaaaacactgcactgtgaacattttagaaaaggtatgtcagactgggattaatgacagcatgattttcaatgactgtaaattgcgataaggaaatgtactgattgccaatacaccccaccctcattacatcatcaggacttgaagccaagggttaacccagcaagctacaaagagggtgtgtcacactgaaactcaatagttgagtttggctgttgttgcaggaaaatgattataactaaaagctctctgatagtgcagagacttaccagaagacacaaggaattgtactgaagagctattacaatccaaatattgccgtttcataaatgtaataagtaatactaattcacagagtattgtaaatggtggatgacaaaagaaaatctgctctgtggaaagaaagaactgtctctaccagggtcaagagcatgaacgcatcaatagaaagaactcggggaaacatcccatcaacaggactacacacttgtatatacattcttgagaacactgcaatgtgaaaatcacgtttgctatttataaacttgtccttagattaatgtgtctggacagattgtgggagtaagtgattcttctaagaattagatacttgtcactgcctatacctgcagctgaactgaatggtacttcgtatgttaatagttgttctgataaatcatgcaattaaagtaaagtgatgcaacatcttgtaaaaaaaaaaaaaaaaaaaa

SEQ ID NO: 7 - DNA, 1846 bp, Homo sapiens
cctctctctctctccctctctctctccctctctctctctccctgtgtcgcttaaacaacagtcctaacttttgtgtgttgcaaatataaaaggcaagccatgtgacagagggacagaagaacaaaagcatttggaagtaacaggacctctttctagctctcagaaaagtctgagaagaaaggagccctgcgttcccctaagctgtgcagcagatactgtgatgatggattgcaagtgcaaagagtaagacaaaactccagcacataaaggacaatgacaaccagaaagcttcagcccgatcctgccctttccttgaacgggactggatcctaggaggtgaagccatttccaattttttgtcctctgcctccctctgctgttcttctagagaagtttttccttacaacaatgagaaaacatgtactagctgcatccttttctatgctctccctgctggtgataatgggagatacagacagtaaaacggacagctcattcataatggactcggaccctcgacgctgcatgaggcaccactatgtggattctatcagtcacccattgtacaagtgtagctcaaagatggtgctcctggccaggtgcgaggggcactgcagccaggcgtcacgctccgagcctttggtgtcgttcagcactgtcctcaagcaacccttccgttcctcctgtcactgctgccggccccagacttccaagctgaaggcactgcggctgcgatgctcagggggcatgcgactcactgccacctaccggtacatcctctcctgtcactgcgaggaatgcaattcctgaggcccgctgctgtgtgtggcttctggatgggacaactgtagaggcagttcgaccagccagggaaagactggcaagaaaagagttaaggcaaaaaaggatgcaacaattctcccgggactctgcatattctagtaataaagactctacatgcttgttgacagagagagatactctgggaacttctttgcagttcccatctcctttctctggtacaatttcttttggttcattttcagattcaggcattttcccccttggctctcaatgctgtttgggtttccaacaattcagcattagtgggaaaaagtgggccctcatacacaagcgtgtcaggctgtcagtgtttggtgcacgctggggaagaatttactttggaaagtagaaaagcccagcttttcctgggacatcttctgttattgttgatgtttttttttaccttgtcattttggtctaaggttgccattgctgctaaaggttaccgatttcaaagtccagataccaagcatgtggatatgtttagctacgtttactcacagccagcgaactgacattaaaataactaacaaacagattcttttatgtgatgctggaactcttgacagctataattattattcagaaatgactttttgaaagtaaaagcagcataaagaatttgtcacaggaaggctgtctcagataaattatggtaaaattttgtaagggagcagacttttaaagacttgcacaaatacggatcctgcactgactctggaaaaggcatatatgtactagtggcatggagaatgcaccatactcatgcatgcaaattagacaaccaagtatgaatctatttgtgggtgtgctatagctttagcgtgtcacgggcatcattctctaatatccacttgtccatgtgaaacatgttgccaaaatggtggcctggcttgtcttctgaacgtttggttcaaatgtgttttggtcctggaggctcaaattttgagttattcccacgttttgaaataaaaagagtatattcaaaaaaaaaaaaaaaaaa

SEQ ID NO: 8 - DNA, 8959 bp, Homo sapiens
ccccagcctccttgccaacgccccctttccctctccccctcccgctcggcgctgaccccccatccccacccccgtgggaacactgggagcctgcactccacagaccctctccttgcctcttccctcacctcagcctccgctccccgccctcttcccggcccagggcgccggcccacccttccctccgccgccccccggccgcggggaggacatggccgcgcacaggccggtggaatgggtccaggccgtggtcagccgcttcgacgagcagcttccaataaaaacaggacagcagaacacacataccaaagtcagtactgagcacaacaaggaatgtctaatcaatatttccaaatacaagttttctttggttataagcggcctcactactattttaaagaatgttaacaatatgagaatatttggagaagctgctgaaaaaaatttatatctctctcagttgattatattggatacactggaaaaatgtcttgctgggcaaccaaaggacacaatgagattagatgaaacgatgctggtcaaacagttgctgccagaaatctgccattttcttcacacctgtcgtgaaggaaaccagcatgcagctgaacttcggaattctgcctctggggttttattttctctcagctgcaacaacttcaatgcagtctttagtcgcatttctaccaggttacaggaattaactgtttgttcagaagacaatgttgatgttcatgatatagaattgttacagtatatcaatgtggattgtgcaaaattaaaacgactcctgaaggaaacagcatttaaatttaaagccctaaagaaggttgcgcagttagcagttataaatagcctggaaaaggcattttggaactgggtagaaaattatccagatgaatttacaaaactgtaccagatcccacagactgatatggctgaatgtgcagaaaagctatttgacttggtggatggttttgctgaaagcaccaaacgtaaagcagcagtttggccactacaaatcattctccttatcttgtgtccagaaataatccaggatatatccaaagacgtggttgatgaaaacaacatgaataagaagttatttctggacagtctacgaaaagctcttgctggccatggaggaagtaggcagctgacagaaagtgctgcaattgcctgtgtcaaactgtgtaaagcaagtacttacatcaattgggaagataactctgtcattttcctacttgttcagtccatggtggttgatcttaagaacctgctttttaatccaagtaagccattctcaagaggcagtcagcctgcagatgtggatctaatgattgactgccttgtttcttgctttcgtataagccctcacaacaaccaacactttaagatctgcctggctcagaattcaccttctacatttcactatgtgctggtaaattcactccatcgaatcatcaccaattccgcattggattggtggcctaagattgatgctgtgtattgtcactcggttgaacttcgaaatatgtttggtgaaacacttcataaagcagtgcaaggttgtggagcacacccagcaatacgaatggcaccgagtcttacatttaaagaaaaagtaacaagccttaaatttaaagaaaaacctacagacctggagacaagaagctataagtatcttctcttgtccatggtgaaactaattcatgcagatccaaagctcttgctttgtaatccaagaaaacaggggcccgaaacccaaggcagtacagcagaattaattacagggctcgtccaactggtccctcagtcacacatgccagagattgctcaggaagcaatggaggctctgctggttcttcatcagttagatagcattgatttgtggaatcctgatgctcctgtagaaacattttgggagattagctcacaaatgcttttttacatctgcaagaaattaactagtcatcaaatgcttagtagcacagaaattctcaagtggttgcgggaaatattgatctgcaggaataaatttcttcttaaaaataagcaggcagatagaagttcctgtcactttctccttttttacggggtaggatgtgatattccttctagtggaaataccagtcaaatgtccatggatcatgaagaattactacgtactcctggagcctctctccggaagggaaaagggaactcctctatggatagtgcagcaggatgcagcggaacccccccaatttgccgacaagcccagaccaaactagaagtggccctgtacatgtttctgtggaaccctgacactgaagctgttctggttgccatgtcctgtttccgccacctctgtgaggaagcagatatccggtgtggggtggatgaagtgtcagtgcataacctcttgcccaactataacacattcatggagtttgcctctgtcagcaatatgatgtcaacaggaagagcagcacttcagaaaagagtgatggcactgctgaggcgcattgagcatcccactgcaggaaacactgaggcttgggaagatacacatgcaaaatgggaacaagcaacaaagctaatccttaactatccaaaagccaaaatggaagatggccaggctgctgaaagccttcacaagaccattgttaagaggcgaatgtcccatgtgagtggaggaggatccatagatttgtctgacacagactccctacaggaatggatcaacatgactggcttcctttgtgcccttggaggagtgtgcctccagcagagaagcaattctggcctggcaacctatagcccacccatgggtccagtcagtgaacgtaagggttctatgatttcagtgatgtcttcagagggaaacgcagatacacctgtcagcaaatttatggatcggctgttgtccttaatggtgtgtaaccatgagaaagtgggacttcaaatacggaccaatgttaaggatctggtgggtctagaattgagtcctgctctgtatccaatgctatttaacaaattgaagaataccatcagcaagttttttgactcccaaggacaggttttattgactgataccaatactcaatttgtagaacaaaccatagctataatgaagaacttgctagataatcatactgaaggcagctctgaacatctagggcaagctagcattgaaacaatgatgttaaatctggtcaggtatgttcgtgtgcttgggaatatggtccatgcaattcaaataaaaacgaaactgtgtcaattagttgaagtaatgatggcaaggagagatgacctctcattttgccaagagatgaaatttaggaataagatggtagaatacctgacagactgggttatgggaacatcaaaccaagcagcagatgatgatgtaaaatgtcttacaagagatttggaccaggcaagcatggaagcagtagtttcacttctagctggtctccctctgcagcctgaagaaggagatggtgtggaattgatggaagccaaatcacagttatttcttaaatacttcacattatttatgaaccttttgaatgactgcagtgaagttgaagatgaaagtgcgcaaacaggtggcaggaaacgtggcatgtctcggaggctggcatcactgaggcactgtacggtccttgcaatgtcaaacttactcaatgccaacgtagacagtggtctcatgcactccataggcttaggttaccacaaggatctccagacaagagctacatttatggaagttctgacaaaaatccttcaacaaggcacagaatttgacacacttgcagaaacagtattggctgatcggtttgagagattggtggaactggtcacaatgatgggtgatcaaggagaactccctatagcgatggctctggccaatgtggttccttgttctcagtgggatgaactagctcgagttctggttactctgtttgattctcggcatttactctaccaactgctctggaacatgttttctaaagaagtagaattggcagactccatgcagactctcttccgaggcaacagcttggccagtaaaataatgacattctgtttcaaggtatatggtgctacctatctacaaaaactcctggatcctttattacgaattgtgatcacatcctctgattggcaacatgttagctttgaagtggatcctaccaggttagaaccatcagagagccttgaggaaaaccagcggaacctccttcagatgactgaaaagttcttccatgccatcatcagttcctcctcagaattcccccctcaacttcgaagtgtgtgccactgtttataccaggtggttagccagcgtttccctcagaacagcatcggtgcagtaggaagtgccatgttcctcagatttatcaatcctgccattgtctcaccgtatgaagcagggattttagataaaaagccaccacctagaatcgaaaggggcttgaagttaatgtcaaagatacttcagagtattgccaatcatgttctcttcacaaaagaagaacatatgcggcctttcaatgattttgtgaaaagcaactttgatgcagcacgcaggtttttccttgatatagcatctgattgtcctacaagtgatgcagtaaatcatagtctttccttcataagtgacggcaatgtgcttgctttacatcgtctactctggaacaatcaggagaaaattgggcagtatctttccagcaacagggatcataaagctgttggaagacgaccttttgataagatggcaacacttcttgcatacctgggtcctccagagcacaaacctgtggcagatacacactggtccagccttaaccttaccagttcaaagtttgaggaatttatgactaggcatcaggtacatgaaaaagaagaattcaaggctttgaaaacgttaagtattttctaccaagctgggacttccaaagctgggaatcctattttttattatgttgcacggaggttcaaaactggtcaaatcaatggtgatttgctgatataccatgtcttactgactttaaagccatattatgcaaagccatatgaaattgtagtggaccttacccataccgggcctagcaatcgctttaaaacagactttctctctaagtggtttgttgtttttcctggctttgcttacgacaacgtctccgcagtctatatctataactgtaactcctgggtcagggagtacaccaagtatcatgagcggctgctgactggcctcaaaggtagcaaaaggcttgttttcatagactgtcctgggaaactggctgagcacatagagcatgaacaacagaaactacctgctgccaccttggctttagaagaggacctgaaggtattccacaatgctctcaagctagctcacaaagacaccaaagtttctattaaagttggttctactgctgtccaagtaacttcagcagagcgaacaaaagtcctagggcaatcagtctttctaaatgacatttattatgcttcggaaattgaagaaatctgcctagtagatgagaaccagttcaccttaaccattgcaaaccagggcacgccgctcaccttcatgcaccaggagtgtgaagccattgtccagtctatcattcatatccggacccgctgggaactgtcacagcccgactctatcccccaacacaccaagattcggccaaaagatgtccctgggacactgctcaatatcgcattacttaatttaggcagttctgacccgagtttacggtcagctgcctataatcttctgtgtgccttaacttgtacctttaatttaaaaatcgagggccagttactagagacatcaggtttatgtatccctgccaacaacaccctctttattgtctctattagtaagacactggcagccaatgagccacacctcacgttagaatttttggaagagtgtatttctggatttagcaaatctagtattgaattgaaacacctttgtttggaatacatgactccatggctgtcaaatctagttcgtttttgcaagcataatgatgatgccaaacgacaaagagttactgctattcttgacaagctgataacaatgaccatcaatgaaaaacagatgtacccatctattcaagcaaaaatatggggaagccttgggcagattacagatctgcttgatgttgtactagacagtttcatcaaaaccagtgcaacaggtggcttgggatcaataaaagctgaggtgatggcagatactgctgtagctttggcttctggaaatgtgaaattggtttcaagcaaggttattggaaggatgtgcaaaataattgacaagacatgcttatctccaactcctactttagaacaacatcttatgtgggatgatattgctattttagcacgctacatgctgatgctgtccttcaacaattcccttgatgtggcagctcatcttccctacctcttccacgttgttactttcttagtagccacaggtccgctctcccttagagcttccacacatggactggtcattaatatcattcactctctgtgtacttgttcacagcttcattttagtgaagagaccaagcaagttttgagactcagtctgacagagttctcattacccaaattttacttgctgtttggcattagcaaagtcaagtcagctgctgtcattgccttccgttccagttaccgggacaggtcattctctcctggctcctatgagagagagacttttgctttgacatccttggaaacagtcacagaagctttgttggagatcatggaggcatgcatgagagatattccaacgtgcaagtggctggaccagtggacagaactagctcaaagatttgcattccaatataatccatccctgcaaccaagagctcttgttgtctttgggtgtattagcaaacgagtgtctcatgggcagataaagcagataatccgtattcttagcaaggcacttgagagttgcttaaaaggacctgacacttacaacagtcaagttctgatagaagctacagtaatagcactaaccaaattacagccacttcttaataaggactcgcctctgcacaaagccctcttttgggtagctgtggctgtgctgcagcttgatgaggtcaacttgtattcagcaggtaccgcacttcttgaacaaaacctgcatactttagatagtctccgtatattcaatgacaagagtccagaggaagtatttatggcaatccggaatcctctggagtggcactgcaagcaaatggatcattttgttggactcaatttcaactctaactttaactttgcattggttggacaccttttaaaagggtacaggcatccttcacctgctattgttgcaagaacagtcagaattttacatacactactaactctggttaacaaacacagaaattgtgacaaatttgaagtgaatacacagagcgtggcctacttagcagctttacttacagtgtctgaagaagttcgaagtcgctgcagcctaaaacatagaaagtcacttcttcttactgatatttcaatggaaaatgttcctatggatacatatcccattcatcatggtgacccttcctataggacactaaaggagactcagccatggtcctctcccaaaggttctgaaggataccttgcagccacctatccaactgtcggccagaccagtccccgagccaggaaatccatgagcctggacatggggcaaccttctcaggccaacactaagaagttgcttggaacaaggaaaagttttgatcacttgatatcagacacaaaggctcctaaaaggcaagaaatggaatcagggatcacaacaccccccaaaatgaggagagtagcagaaactgattatgaaatggaaactcagaggatttcctcatcacaacagcacccacatttacgtaaagtttcagtgtctgaatcaaatgttctcttggatgaagaagtacttactgatccgaagatccaggcgctgcttcttactgttctagctacactggtaaaatataccacagatgagtttgatcaacgaattctttatgaatacttagcagaggccagtgttgtgtttcccaaagtctttcctgttgtgcataatttgttggactctaagatcaacaccctgttatcattgtgccaagatccaaatttgttaaatccaatccatggaattgtgcagagtgtggtgtaccatgaagaatccccaccacaataccaaacatcttacctgcaaagttttggttttaatggcttgtggcggtttgcaggaccgttttcaaagcaaacacaaattccagactatgctgagcttattgttaagtttcttgatgccttgattgacacgtacctgcctggaattgatgaagaaaccagtgaagaatccctcctgactcccacatctccttaccctcctgcactgcagagccagcttagtatcactgccaaccttaacctttctaattccatgacctcacttgcaacttcccagcattccccaggaatcgacaaggagaacgttgaactctcccctaccactggccactgtaacagtggacgaactcgccacggatccgcaagccaagtgcagaagcaaagaagcgctggcagtttcaaacgtaatagcattaagaagatcgtgtgaagcttgcttgctttcttttttaaaatcaacttaacatgggctcttcactagtgaccccttccctgtccttgccctttccccccatgttgtaatgctgcacttcctgttttataatgaacccatccggtttgccatgttgccagatgatcaactcttcgaagccttgcctaaatttaatgctgccttttctttaactttttttcttctacttttggcgtgtatctggtatatgtaagtgttcagaacaactgcaaagaaagtgggaggtcaggaaacttttaactgagaaat

SEQ ID NO: 9 - DNA, 4566 bp, Homo sapiens
cggtcccatcccaagaaccgactaaggctgtgagtgtccgggaaccagacccgcttggaggccacagccccgacgtcccgcgcccacgcggcagatcgggcgctgcggcctgggagcctcggggagatgcggagcaggagcaattccggggtccgcttggacgggtacgcgcggctggtgcagcaaaccatcctgtgttaccagaatcccgtcacggggctgctgtcagccagccatgagcagaaggatgcctgggtgcgggataacatctacagtatcctggccgtgtggggcctgggcatggcctaccgtaagaatgcagaccgcgatgaggacaaggccaaggcctacgagctggagcagaacgtggtgaagctgatgcgaggtcttctccagtgcatgatgagacaggtggccaaagtggagaagttcaaacacactcagagcaccaaggacagcctgcacgccaagtacaacaccgccacctgtggcacggtggtgggcgacgaccagtggggccacctccaggtggatgccacctctctcttcctcctgttcctggcccagatgaccgcctcaggcttacgtatcattttcactctcgatgaggtggccttcatacagaatcttgtcttttacatagaagctgcatataaagtcgctgattatggaatgtgggagcgtggagataagactaatcagggcatcccggaattgaatgcaagctccgtaggaatggccaaggcagctcttgaggcaattgatgaactggacctttttggagcccatggaggacgcaagtcagtgattcatgttctgccagatgaggtcgagcactgccagtctattctgttctccatgctgccaagagcgtcgacatctaaagaaattgatgctggacttctttccattatttccttcccggcctttgcagtggaagatgtaaaccttgtaaatgtgaccaaaaatgaaattatttctaagctccaggggcgttatggatgctgtcgcttccttcgagatggttataaaactccaagagaggaccctaatcgactgcattatgaccctgctgaactcaagctcttcgaaaacattgaatgtgagtggcctgtgttttggacatattttataatagatggagtcttcagtggtgatgctgttcaggtccaagaataccgagaggccctggagggaatactcatcagaggcaagaatgggatccgcctggtgcctgaactctacgctgtcccgcctaacaaggtagatgaagagtacaagaatcctcacacagtagaccgagttcctatggggaaggtgcctcatctgtggggccaatccttgtacatcctcagctcgctgttggcagagggattccttgccgctggtgaaatcgatcccttaaatagaagattttccacttcagtcaaacctgatgttgtagtacaagttactgttttggcagaaaacaatcacattaaggacttattgaggaaacacggggtgaacgtccagagtatcgcggacattcatccaattcaagtccagccgggccggattcttagtcacatatatgccaagcttggacggaataagaatatgaatttgagtgggcgaccgtatcgacatattggtgtccttggaacctctaaactatatgtgattaggaaccaaatctttacttttacaccccagttcaccgaccagcatcacttctacctggccctcgacaatgagatgatcgtggagatgctaaggatcgagctggcctacctgtgcacctgctggaggatgacgggcagacccacactcaccttccccatcagtcgcaccatgctcacaaatgatggctcagacattcattctgctgtgctctccacaattagaaaactagaggatggatattttggaggagccagagtaaaattagggaacctttcggaatttctcaccacatcgttctacacatatctgacttttctggatccagactgtgatgagaagttgtttgacaatgccagcgaagggactttcagtcctgatagtgattcagatttggtaggatatctggaagacacctgtaatcaagaaagccaagacgaacttgaccattatatcaaccaccttctgcaaagcacatcgttgaggtcctatctgcctcctctttgtaagaacacagaagaccgccatgtcttcagtgctatccactccacgcgggacatactttctgtgatggcaaaagcaaagggtttggaagttccatttgttcccatgactttgccgactaaagttctaagtgcccaccgtaaatcactgaatcttgttgattctcctcagccactcctagaaaaggttcctgaaagtgactttcagtggcccagagatgaccatggtgacgtggactgtgagaagctggttgagcagctaaaagattgttcgaacctacaggaccaagcagacattctgtacattctttatgtcataaagggtcccagctgggacacaaatctctctggacagcacggggtcaccgttcaaaaccttcttggtgagctctatgggaaagccggcttgaaccaggagtggggtctgattcgctacatctcaggccttctcaggaagaaagtggaggtcctggctgaggcctgcacagacctgctttcgcaccagaagcagctcaccgtgggcctgccgcccgagccccgggagaagatcatctctgcgccccttcccccagaggagctcacaaaactcatctacgaggccagtgggcaggacatcagcattgccgtcctcacgcaggagattgtggtttacctggccatgtatgtcagggcgcagcccagcctctttgtggagatgctgagactccggattggactgatcattcaggtgatggccacggagctggcacggagcctgaactgctcaggagaagaggcttctgaaagtttgatgaacctcagccctttcgatatgaaaaatctcctgcaccatattctaagtgggaaagagtttggcgttgaaagaagtgtgcgccctatccactcctccacatccagccctaccatctccatccacgaggtgggccataccggagtcaccaaaactgagaggagtggcattaacagactgaggagtgaaatgaaacagatgactaggcggtttagtgctgatgaacagttcttttctgtgggccaggccgcgtccagcagtgcgcattcctccaagtctgcgaggtccagcaccccatcctcgcccactggcacgtcatcctcagactcgggaggacatcacatcggctggggtgagcggcagggccagtggctgcgcaggagaaggctggatggggccatcaacagggtccccgtgggattctaccagagggtgtggaagatcctccagaagtgccacggtctctccatcgatggttatgtcctcccatcctcgacgacccgagagatgaccccgcatgagatcaagtttgctgtccatgtcgaatcggtgctgaaccgcgtgccgcagcccgagtaccggcagctgctggtggaagccatcatggtgctgacgctgctctcggacacggagatgaccagcatcgggggcatcatccacgtggaccagatcgtgcagatggccagtcagctgttcttgcaggaccaggtgtcaattggtgccatggacaccctggagaaagaccaagccacaggaatctgccacttcttttatgacagcgctccgagtggggcttatgggacgatgacctacctaacaagagcagtggcttcttatttgcaggaattgttgcccaattcgggctgccagatgcaatagggtctcacctggaaacatgatcacactctcaatctgtcacgtgccccctagccttactgggaaccttctgtcccccaagatcccctgtgctatcaggaaagcatgtcccatcagaaacactctcggggggcaatggtagcactcaccctgaaactgatgtatgttaaagccacagagatagagctgaggagtcctgtgttcccccgcaaggagcaccccgggatcattttctaggttcatttctctggaacatttgctgtagcatctggtctcacggactctgaggaggaattggaaattggtctcttttgagtgcagagggaactgagacgccagcttaaattggctcttgcagagagttacagaaatagtttcgatgagctagtgacacatcctaaagatgcaaagatcctcctggcggcagtagccttgacaagggccacctcttcacaggatgcagtctgtctgtgcaccaaactcttcaccaaatagaacacttgtgtctctctgtggaatggggggttttcttgtgccttgcttgctttcatagccttccattttattggcatggctgccttgatgtaacataattctctgtccccaagatttagaaaattcctcttcgttcaccttggctcatggtcttccagggtttttatcctggctgtctatgaactagggttttctcctgccttaggaaaaatactgcatcttctggaatctagaaaaaaa

SEQ ID NO: 10 - DNA, 1600 bp, Homo sapiens
cggagcgaggcagcgcgcccggctcccgcgccatggggcggctggtggctgtgggcttgctggggatcgcgctggcgctcctgggcgagaggcttctggcactcagaaatcgacttaaagcctccagagaagtagaatctgtagaccttccacactgccacctgattaaaggaattgaagctggctctgaagatattgacatacttcccaatggtctggctttttttagtgtgggtctaaaattcccaggactccacagctttgcaccagataagcctggaggaatactaatgatggatctaaaagaagaaaaaccaagggcacgggaattaagaatcagtcgtgggtttgatttggcctcattcaatccacatggcatcagcactttcatagacaacgatgacacagtttatctctttgttgtaaaccacccagaattcaagaatacagtggaaatttttaaatttgaagaagcagaaaattctctgttgcatctgaaaacagtcaaacatgagcttcttccaagtgtgaatgacatcacagctgttggaccggcacatttctatgccacaaatgaccactacttctctgatcctttcttaaagtatttagaaacatacttgaacttacactgggcaaatgttgtttactacagtccaaatgaagttaaagtggtagcagaaggatttgattcagcaaatgggatcaatatttcacctgatgataagtatatctatgttgctgacatattggctcatgaaattcatgttttggaaaaacacactaatatgaatttaactcagttgaaggtacttgagctggatacactggtggataatttatctattgatccttcctcgggggacatctgggtagtctgtcatcctaatggccagaagctcttcgtgtatgacccgaacaatcctccctcgtcagaggttctccgcatccagaacattctatctgagaagcctacagtgactacagtttatgccaacaatgggtctgttctccaaggaagttctgtagcctcagtgtatgatgggaagctgctcataggcactttataccacagagccttgtattgtgaactctaaattgtacttttggcatgaaagtgcgataacttaacaattaattttctatgaaattgctaattctgagggaatttaaccagcaacattgacccagaaatgtatggcatgtgtagttaattttattccagtaaggaacggcccttttagttcttagagcacttttaacaaaaaaggaaaatgaacaggttctttaaaatgccaagcaagggacagaaaagaaagctgctttcgaataaagtgaatacattttgcacaaagtaagcctcacctttgccttccaactgccagaacatggattccactgaaatagagtgaattatatttccttaaaatgtgagtgacctcacttctggcactgtgactactatggctgtttagaactactgataataacgtattttgatgttttgtacttacatctttgtttaccattaaaaagttggagttatattaaagactaactaaaatcccaaaaaaaaaaaaaaaaaaaaaaaaaaaaaaaa

SEQ ID NO: 11 - DNA, 10692 bp, Homo sapiens
gaggagagagcagagtataccgcagacatcatttctactacagtggcggagccgtacaggacctgtttcactgcagggggatccaaaacaagccccgtggagcagcagccagagcaacagcagccgcaagacattgtttctctccctctgcccccccttccccacgcaaccccagatccatttacactttacagttttacctcacaaaaactactacaagcaccaagctccctgatggaaaggagcatcgtgcatcaagtcaccagggtggtccattcaagctgcagatttgtttgtcatccttgtacagcaatctcctcctccactgccactacagggaagtgcatcacatgtcagcatactggagcatagtgaaagagtctattttgaagcttcaaacttagtgctgctgcagaccaggaacaagagagaaagagtggatttcagcctgcacggatggtcttgaaacacaaatggtttttggtctaggcgttttacactgagattctccactgccaccctttctactcaagcaaaatcttcgtgaaaagatctgctgcaaggaactgatagcttatggttctccattgtgatgaaagcacatggtacagttttccaaagaaattagaccattttcttcgtgagaaagaaatcgacgtgctgttttcatagggtatttctcacttctctgtgaaaggaagaaagaacacgcctgagcccaagagccctcaggagccctccagagcctgtgggaagtctccatggtgaagtataggctgaggctacctgtgaacagtacgcagtgaatgttcatccagagctgctgttggcggattgtacccacggggagatgattcctcatgaagagcctggatcccctacagaaatcaaatgtgactttccgtttatcagactaaaatcagagccatccagacagtgaaacagtcaccgtggaggggggacggcgaaaaatgaaatccaaccaagagcggagcaacgaatgcctgcctcccaagaagcgcgagatccccgccaccagccggtcctccgaggagaaggcccctaccctgcccagcgacaaccaccgggtggagggcacagcatggctcccgggcaaccctggtggccggggccacgggggcgggaggcatgggccggcagggacctcggtggagcttggtttacaacagggaataggtttacacaaagcattgtccacagggctggactactccccgcccagcgctcccaggtctgtccccgtggccaccacgctgcctgccgcgtacgccaccccgcagccagggaccccggtgtcccccgtgcagtacgctcacctgccgcacaccttccagttcattgggtcctcccaatacagtggaacctatgccagcttcatcccatcacagctgatccccccaaccgccaaccccgtcaccagtgcagtggcctcggccgcaggggccaccactccatcccagcgctcccagctggaggcctattccactctgctggccaacatgggcagtctgagccagacgccgggacacaaggctgagcagcagcagcagcagcagcagcagcagcagcagcagcatcagcatcagcagcagcagcagcagcagcagcagcagcagcagcagcagcacctcagcagggctccggggctcatcaccccggggtcccccccaccagcccagcagaaccagtacgtccacatttccagttctccgcagaacaccggccgcaccgcctctcctccggccatccccgtccacctccacccccaccagacgatgatcccacacacgctcaccctggggcccccctcccaggtcgtcatgcaatacgccgactccggcagccactttgtccctcgggaggccaccaagaaagctgagagcagccggctgcagcaggccatccaggccaaggaggtcctgaacggtgagatggagaagagccggcggtacggggccccgtcctcagccgacctgggcctgggcaaggcaggcggcaagtcggttcctcacccgtacgagtccaggcacgtggtggtccacccgagcccctcagactacagcagtcgtgatccttcgggggtccgggcctctgtgatggtcctgcccaacagcaacacgcccgcagctgacctggaggtgcaacaggccactcatcgtgaagcctccccttctaccctcaacgacaaaagtggcctgcatttagggaagcctggccaccggtcctacgcgctctcaccccacacggtcattcagaccacacacagtgcttcagagccactcccggtgggactgccagccacggccttctacgcagggactcaaccccctgtcatcggctacctgagcggccagcagcaagcaatcacctacgccggcagcctgccccagcacctggtgatccccggcacacagcccctgctcatcccggtcggcagcactgacatggaagcgtcgggggcagccccggccatagtcacgtcatccccccagtttgctgcagtgcctcacacgttcgtcaccaccgcccttcccaagagcgagaacttcaaccctgaggccctggtcacccaggccgcctacccagccatggtgcaggcccagatccacctgcctgtggtgcagtccgtggcctccccggcggcggctccccctacgctgcctccctacttcatgaaaggctccatcatccagttggccaacggggagctaaagaaggtggaagacttaaaaacagaagatttcatccagagtgcagagataagcaacgacctgaagatcgactccagcaccgtagagaggattgaagacagccatagcccgggcgtggccgtgatacagttcgccgtcggggagcaccgagcccaggtcagcgttgaagttttggtagagtatcctttttttgtgtttggacagggctggtcatcctgctgtccggagagaaccagccagctctttgatttgccgtgttccaaactctcagttggggatgtctgcatctcgcttaccctcaagaacctgaagaacggctctgttaaaaagggccagcccgtggatcccgccagcgtcctgctgaagcactcaaaggccgacggcctggcgggcagcagacacaggtatgccgagcaggaaaacggaatcaaccaggggagtgcccagatgctctctgagaatggcgaactgaagtttccagagaaaatgggattgcctgcagcgcccttcctcaccaaaatagaacccagcaagcccgcggcaacgaggaagaggaggtggtcggcgccagagagccgcaaactggagaagtcagaagacgaaccacctttgactcttcctaagccttctctaattcctcaggaggttaagatttgcattgaaggccggtctaatgtaggcaagtagaggcagcgtgggggaaaggaaacgtggctctcccttatcatttgtatccagattactgtactgtaggctaaaataacacagtatttacatgttatcttcttaattttaggtttctgttctaaccttgtcattagagttacagcaggtgtgtcgcaggagactggtgcatatgctttttccacgagtgtctgtcagtgagcgggcgggaggaagggcacagcaggagcggtcagggctccaggcatccccggggaagaaaggaacggggcttcacagtgcctgccttctctagcggcacagaagcagccgggggcgctgactcccgctagtgtcaggagaaaagtcccgtgggaagagtcctgcaggggtgcagggttgcacgcatgtgggggtgcacaggcgctgtggcggcgagtgagggtctctttttctctgcctccctctgcctcactctcttgctatcggcatgggccgggggggttcagagcagtgtcctcctggggttcccacgtgcaaaatcaacatcaggaacccagcttcagggcatcgcggagacgcgtcagatggcagatttggaaagttaaccatttaaaagaacatttttctctccaacatattttacaataaaagcaacttttaattgtatagatatatatttccccctatggggcctgactgcactgatatatattttttttaaagagcaactgccacatgcgggatttcatttctgctttttactagtgcagcgatgtcaccagggtgttgtggtggacagggaagcccctgctgtcatggccccacatggggtaaggggggttgggggtgggggagagggagagagcgaacacccacgctggtttctgtgcagtgttaggaaaaccaatcaggttattgcattgacttcactcccaagaggtagatgcaaactgcccttcagtgagagcaacagaagctcttcacgttgagtttgcgaaatctttttgtctttgaactctagtactgtttatagttcatgactatggacaactcgggtgccactttttttttttttcagattccagtgtgacatgaggaattagattttgaagatgagcatatattactatctttaagcatttaaaaatactgttcacactttattaccaagcatcttggtctctcattcaacaagtactgtatctcactttaaactctttggggaaaaaacaaaaacaaaaaaaactaagttgctttctttttttcaacactgtaactacatttcagctctgcagaattgctgaagagcaagatattgaaagtttcaatgtggtttaaagggatgaatgtgaattatgaactagtatgtgacaataaatgaccaccaagtactacctgacgggaggcacttttcactttgatgtctgagaatcagttcaaggcatatgcagagttggcagagaaactgagagaaaagggatggagaagagaatactcatttttgtccagtgtttttctttttaagatgaacttttaaagaaccttgcgatttgcacatattgagtttataacttgtgtgatattcctgcagtttttatccaataacattgtgggaaaggtttgggggactgaacgagcataaataaatgtagcaaaatttctttctaacctgcctaaactctaggccattttataaggttatgttcctttgaaaattcattttggtctttttaccacatctgtcacaaaaagccaggtcttagcgggctcttagaaactctgagaattttcttcagattcattgagagagttttccataaagacatttatatatgtgagcaagattttttttaaacaattactttattattgttgttattaatgttattttcagaatggcttttttttttctattcaaaatcaaatcgagatttaatgtttggtacaaacccagaaagggtatttcatagtttttaaacctttcattcccagagatccgaaatatcatttgtgggttttgaatgcatctttaaagtgctttaaaaaaaagttttataagtagggagaaatttttaaatattcttacttggatggctgcaactaaactgaacaaatacctgacttttcttttaccccattgaaaatagtactttcttcgtttcacaaattaaaaaaaaaatctggtatcaacccacattttggctgtctagtattcatttacatttagggttcaccaggactaatgatttttataaaccgttttctggggtgtaccaaaaacatttgaataggtttagaatagctagaatagttccttgactttcctcgaatttcattaccctctcagcatgcttgcagagagctgggtgggctcattcttgcagtcatactgcttatttagtgctgtattttttaaacgtttctgttcagagaacttgcttaatcttccatatattctgctcagggcacttgcaattattaggttttgtttttctttttgttttttagcctttgatggtaagaggaatacgggctgccacatagactttgttctcattaatatcactatttacaactcatgtggactcagaaaaacacacaccaccttttggcttacttcgagtattgaattgactggatccactaaaccaacactaagatgggaaaacacacatggtttggagcaataggaacatcatcataatttttgtggttctatttcaggtataggaattataaaataattggttctttctaaacacttgtcccatttcattctcttgcttttttagcatgtgcaatactttctgtgccaatagagtctgaccagtgtgctatatagttaaagctcattcccttttggctttttccttgtttggttgatcttccccattctggccagagcagggctggagggaaggagccaggagggagagagcctcccacctttcccctgctgcggatgctgagtgctggggcggggagccttcaggagccccgtgcgtctgccgccacgttgcagaaagagccagccaaggagacccgggggaggaaccgcagtgtcccctgtcaccacacggaatagtgaatgtggagtgtggagaggaaggaggcagattcatttctaagacgcactctggagccatgtagcctggagtcaacccattttccacggtcttttctgcaagtgggcaggcccctcctcggggtctgtgtccttgagacttggagccctgcctctgagcctggacgggaagtgtggcctgttgtgtgtgtgcgttctgagcgtgttggccagtggctgtggaggggaccacctgccacccacggtcaccactcccttgtggcagctttctcttcaaataggaagaacgcacagagggcaggagcctcctgtttgcagacgttggcgggccccgaggctcccagagcagcctctgtcaccgcttctgtgtagcaaacattaacgatgacaggggtagaaattcttcggtgccgttcagcttacaaggatcagccatgtgcctctgtactatgtccactttgcaatatttaccgacagccgtcttttgttctttctttcctgttttccatttttaaactagtaacagcaggccttttgcgtttacaatggaacacaatcaccaagaaattagtcagggcgaaaagaaaaaaataatactattaataagaaaccaacaaacaagaacctctctttctagggatttctaaatatataaaatgactgttccttagaatgtttaacttaagaattatttcagtttgtctgggccacactggggcagaggggggagggagggatacagagatggatgccacttacctcagatcttttaaagtggaaatccaaattgaattttcatttggactttcaggataattttctatgttggtcaacttttcgttttccctaactcacccagtttagtttgggatgatttgatttctgttgttgttgatcccatttctaacttggaattgtgagcctctatgttttctgttaggtgagtgtgttgggttttttccccccaccaggaagtggcagcatccctccttctcccctaaagggactctgcggaacctttcacacctctttctcagggacggggcaggtgtgtgtgtggtacactgacgtgtccagaagcagcactttgactgctctggagtagggttgtacaatttcaaggaatgtttggatttcctgcatcttgtggattactccttagataccgcatagattgcaatataatgctgcatgttcaagatgaacagtagctcctagtaatcataaaatccactctttgcacagtttgatctttactgaaatatgttgccaaaatttatttttgttgttgtagctctggattttgttttgttttgttttttaaggaaacgattgacaataccctttaacatctgtgactactaaggaaacctatttctttcatagagagaaaaatctccaatgcttttgaagacactaataccgtgctatttcagatatgggtgaggaagcagagctctcggtaccgaaggccgggcttcttgagctgtgttggttgtcatggctactgtttcatgaaccacaagcagctcaacagactggtctgttgccttctgaaaccctttgcacttcaatttgcaccaggtgaaaacagggccagcagactccatggcccaattcggtttcttcggtggtgatgtgaaaggagagaattacactttttttttttttaagtggcgtggaggcctttgcttccacatttgtttttaacccagaatttctgaaatagagaatttaagaacacatcaagtaataaatatacagagaatatacttttttataaagcacatgcatctgctattgtgttgggttggtttcctctcttttccacggacagtgttgtgtttctggcatagggaaactccaaacaacttgcacacctctactccggagctgagatttcttttacatagatgacctcgcttcaaatacgttaccttactgatgataggatcttttcttgtagcactataccttgtgggaatttttttttaaatgtacacctgatttgagaagctgaagaaaacaaaattttgaagcactcactttgaggagtacaggtaatgttttaaaaaattgcacaaaagaaaaatgaatgtcgaaatgattcattcagtgtttgaaagatatggctctgttgaaacaatgagtttcatactttgtttgtaaaaaaaaaaaagcagagaagggttgaaagttacatgtttttttgtatatagaaatttgtcatgtctaaatgatcagatttgtatggttatggcctggaagaattactacgtaaaaggctcttaaactatacctatgcttattgttatttttgttacatatagccctcgtctgagggaggggaactcggtattctgcgatttgagaatactgttcattcctatgctgaaagtacttctctgagctcccttcttagtctaaactcttaagccattgcaacttctttttcttcagagatgatgtttgacattttcagcacttcctgttcctataaacccaaagaatataatcttgaacacgaagtgtttgtaacaagggatccaggctaccaatcaaacaggactcattatggggacaaaaaaaaaaattatttcaccttctttccccccacacctcatttaaatggggggagtaaaaacatgatttcaatgtaaatgcctcattttattttagttttattttgatttttatttaatataaagaggccagaataaatacggagcatcttctcagaatagtattcctgtccaaaaatcaagccggacagtggaaactggacagctgtggggatattaagcacccccacttacaattcttaaattcagaatctcgtcccctcccttctcgttgaaggcaactgttctggtagctaactttctcctgtgtaatggcgggagggaacaccggcttcagtttttcatgtccccatgacttgcatacaaatggttcaactgtattaaaattaagtgcatttggccaataggtagtatctatacaataacaacaatctctaagaatttccataacttttcttatctgaaaggactcaagtcttccactgcagatacattggaggcttcacccacgttttctttccctttagtttgtttgctgtctggatggccaatgagcctgtctccttttctgtggccaatctgaaggccttcgttggaagtgttgtttacagtaatccttaccaagataacatactgtcctccagaataccaagtattaggtgacactagctcaagctgttgtcttcagagcagttaccaagaagctcggtgcacaggttttctctggttcttacaggaaccacctactctttcagttttctggcccaggagtggggtaaatcctttagttagtgcatttgaacttgatacctgtgcattcagttctgtgaatactgccctttttggcggggtttcctcatctccccagcctgaactgctcaactctaaacccaaattagtgtcagccgaaaggaggtttcaagatagtcctgtcagtatttgtggtgaccttcagattagacagtcttcatttccagccagtggagtcctggctccagagccatctctgagactcgtactactggatgttttaatatcagatcattacccaccatatgcctcccacaggccaagggaaaacagacaccagaacttgggttgagggcactaccagactgacatggccagtacagaggagaactagggaaggaatgatgttttgcaccttattgaaaagaaaattttaagtgcatacataatagttaagagcttttattgtgacaggagaacttttttccatatgcgtgcatactctctgtaattccagtgtaaaatattgtacttgcactagcttttttaaacaaatattaaaaaatggaagaattcatattctattttctaatcgtggtgtgtctatttgtaggatacactcgagtctgtttattgaattttatggtccctttctttgatggtgcttgcaggttttctaggtagaaattatttcattattataataaaacaatgtttgattcaaaatttgaacaaaattgttttaaataaattgtctgtataccagtacaagtttattgtttcagtatactcgtactaataaaataacagtgccaattgcaaaaaaaaaaaaaaaaaaaaaaaaaaaaaaaaaaaaaaaaaaaaaaaaaaaaaaaaa

SEQ ID NO: 12 - DNA, 3673 bp, Homo sapiens
agtgggactcagcgggcgtggaggtcgcggcggacggagcgagccctgggcgagtgaattgtggctgtgggttgacggtggagacaccccccggagaggcggagggaagggaggcgaggctgcacctgcatgcttcccgcctcccactccccagcgcccccggaccgtgcagttctctgcaggaccaggccatggagctcgaagtccggcgggtccgacaggcgttcctgtccggccggtcgcgacctctgcggtttcggctgcagcagctggaggccctgcggaggatggtgcaggagcgcgagaaggatatcctgacggccatcgccgccgacctgtgcaagagtgaattcaatgtgtacagtcaggaagtcattactgtccttggggaaattgattttatgcttgagaatcttcctgaatgggttactgctaaaccagttaagaagaacgtgctcaccatgctggatgaggcctatattcagccacagcctctgggagtggtgctgataatcggagcttggaattaccccttcgttctcaccattcagccactgataggagccatcgctgcaggaaatgctgtgattataaagccttctgaactgagtgaaaatacagccaagatcttggcaaagcttctccctcagtatttagaccaggatctctatattgttattaatggtggtgttgaggaaaccacggagctcctgaagcagcgatttgaccacattttctatacgggaaacactgcggttggcaaaattgtcatggaagctgctgccaagcatctgacccctgtgactcttgaactgggagggaaaagtccatgttatattgataaagattgtgacctggacattgtttgcagacgcataacctggggaaaatacatgaattgtggccaaacctgcattgcacccgactatattctctgtgaagcatccctccaaaatcaaattgtatggaagattaaggaaacagtgaaggaattttatggagaaaatataaaagagtctcctgattatgaaaggatcatcaatcttcgtcattttaagaggatactaagtttgcttgaaggacaaaagatagcttttggtggggagactgatgaggccacacgctacatagccccaacagtacttaccgatgttgatcctaaaaccaaggtgatgcaagaagaaatttttggaccaattcttccaatagtgcctgtgaaaaatgtagatgaggccataaatttcataaatgaacgtgaaaagcctctggctctttatgtattttcgcataaccataagctcatcaaacggatgattgatgagacatccagtggaggtgtcacaggcaatgacgtcattatgcacttcacgctcaactctttcccatttggaggagtgggttccagtgggatgggagcttatcacggaaaacatagttttgatactttttctcatcagcgtccctgtttattaaaaagtttaaagagagaaggtgctaacaaactcagatatcctcccaacagccagtcaaaggtggattgggggaaattttttctcttgaaacggttcaacaaagaaaaactcggtctcctgttgctcactttcctgggtattgtagccgctgtgcttgtcaaggcagaatattactgaagaatgatcctgttcaacctcctagtgcctctactgaattattcctcttttaaatggttaatgaaccaataatttttaaatcataccaaaaatagtaagaaaatatgcaaacactctgtgatcaaacttaaaagtcattgccattcatcattaataaaagttgccatttcaactacgtcccaacattccctaatagggtattcagggaacctgtcttaaattgtgcttatctaaatcttggaactttgagctaggggaggagaatgtattagactaaatacaaactgcggggttgtaagggagtctcagaacctcactgaatccttcactccagttaatggcactgctcacttcctgcctctgctgccaccatcactgtgtgaagctttcaagagcttggtacttcccagggctaccggcagtcctctgtagtccagagaggtgagattagatcttcttggttccctgtgaggtttcaggcactaaaactctatgtggggaagggaggggttactcctcctccaatgggactcaaggacttgacctccaggagtaggcccctggtcagaagtgccatctcaccagtggtcttcattcttcctcattcattctttatcatcctgtgttctgtttagttgcaacaatctcttgtgactaatgtcactcaaagcatcttgtaacctagggcttcctggaagttagttgccaaagtcatgcaagcatcacctgtcattcttgtgttggagttatagaattctacatcttataaaacctaactggcatttaaaaaatactgtggccgggcgtggtggctcatgcctgtaatcccagcactttgggaggccgaggtgggaggattgcttgagtccaggaatttgagaccagcctggacaacacagtgagacctcatctctatcaaaaaataaaaattagctagatgtggtggcatgagcctgtgttcccagctgcttaggaggctgaagcaggaggattgattgagcctgcgaggccaaggctgcagcaggctgtgattgcaccactgcacttcagcttgggcaacagagcaagaccctgtctccgaaacaaataaaaaatactgtaataaaagtacttataaacatactaatcctctttcaggaccctaaagttgcaggttagtaggtcttcaaggacaaatctgtaagtttcttttctgtagtgcaagtaaaatttcactttttgaaactatagagagatccctttctgattagcctacagaacttaaagtgagggaaccatttcctctcacagacaaagaggcctgggatattaggactttggggtttgagagcatcatggggcagacagatggtggatggtctggacaagaagcgagtaagccactgcggttggtcatactgaagggaattgatggcaagaggatcccctgagcaagtcagaagttactctcatcagtcgttcatggtcacaacctgaggtactctgctgagtgggcaaggctgaagtaagaggcctgtggaatgcagcattacctgctggacagagcagggcaggcagttctatgccttggagctcctgactgcagggactctgtccccacactcagaaagactcagctcactcaatgagagaatgtgatttactttatagaacgtataatcaactttgttgaataatttgttctattaaggctgtctaaaatgtgatgtcttcatcatagtatgaagtgttgaaaattaataacgagcctagtttaggaaaaagctgcttaaaactgtggctctaagagagtaatcataaaataccttagataaaattgcactatggaattttcattgagtatgtttaaattattggcttgtctactaatacatctgcttcaaaatgaacatatttcataaaattggcatcaattttaatgacgctcctggtatggaacctcagatataccctattggagacaatcctttgatcataaattctccccaactataaatcattttatgtctttaaaaaaaaaaaaa

SEQ ID NO: 13 - DNA, 1647 bp, Homo sapiens
tcattcattgccggcctgaggactcctagctcggccccgctccgcgctacagcccaaagcccagcctgagacccagccgccctcgtatgcccacggcctagctccccttccctccaacagacagactgggaaaaccgagtgggcgacggctgagcaaggactctccagtcctcagtcaccttggacaaagaagtgtggatcctcagattccatcttttccaactccaaggtgccatggcagagaaggtgctggtaacaggtggggctggctacattggcagccacacggtgctggagctgctggaggctggctacttgcctgtggtcatcgataacttccataatgccttccgtggagggggctccctgcctgagagcctgcggcgggtccaggagctgacaggccgctctgtggagtttgaggagatggacattttggaccagggagccctacagcgtctcttcaaaaagtacagctttatggcggtcatccactttgcggggctcaaggccgtgggcgagtcggtgcagaagcctctggattattacagagttaacctgaccgggaccatccagcttctggagatcatgaaggcccacggggtgaagaacctggtgttcagcagctcagccactgtgtacgggaacccccagtacctgccccttgatgaggcccaccccacgggtggttgtaccaacccttacggcaagtccaagttcttcatcgaggaaatgatccgggacctgtgccaggcagacaagacttggaacgcagtgctgctgcgctatttcaaccccacaggtgcccatgcctctggctgcattggtgaggatccccagggcatacccaacaacctcatgccttatgtctcccaggtggcgatcgggcgacgggaggccctgaatgtctttggcaatgactatgacacagaggatggcacaggtgtccgggattacatccatgtcgtggatctggccaagggccacattgcagccttaaggaagctgaaagaacagtgtggctgccggatctacaacctgggcacgggcacaggctattcagtgctgcagatggtccaggctatggagaaggcctctgggaagaagatcccgtacaaggtggtggcacggcgggaaggtgatgtggcagcctgttacgccaaccccagcctggcccaagaggagctggggtggacagcagccttagggctggacaggatgtgtgaggatctctggcgctggcagaagcagaatccttcaggctttggcacgcaagcctgaggaccctcccctaccaaggaccaggaaaagcagcagctgcctgctctccagcctctggcaggaactcagggccctggagctgctggggccaagccaaggcctcccctacctcaaaccccagctgggcccgcttagcccaccaggcatgaggccaagggctccactgaccaggaggccgaggtctctaactcttatcttccacagggtccaagagttcatcaggacccccaagagtgagtgagggggcaaggctctggcacaaaacctcctcctcccaggcactcatttatattgctctgaaagagctttccaaagtatttaaaaataaaaacaagttttcttacactgggaaaaaaaaaaaaaaaa

SEQ ID NO: 14 - DNA, 1396 bp, Homo sapiens
gcgggggaagctggcgggctgaggcgccccgctcttctcctctgccccgggcccgcgaggccacgcgtcgccgctcgagagatgatgcaggacgtgtccagctcgccagtctcgccggccgacgacagcctgagcaacagcgaggaagagccagaccggcagcagccgccgagcggcaagcgcgggggacgcaagcggcgcagcagcaggcgcagcgcgggcggcggcgcggggcccggcggagccgcgggtgggggcgtcggaggcggcgacgagccgggcagcccggcccagggcaagcgcggcaagaagtctgcgggctgtggcggcggcggcggcgcgggcggcggcggcggcagcagcagcggcggcgggagtccgcagtcttacgaggagctgcagacgcagcgggtcatggccaacgtgcgggagcgccagcgcacccagtcgctgaacgaggcgttcgccgcgctgcggaagatcatccccacgctgccctcggacaagctgagcaagattcagaccctcaagctggcggccaggtacatcgacttcctctaccaggtcctccagagcgacgagctggactccaagatggcaagctgcagctatgtggctcacgagcggctcagctacgccttctcggtctggaggatggagggggcctggtccatgtccgcgtcccactagcaggcggagccccccaccccctcagcagggccggagacctagatgtcattgtttccagagaaggagaaaatggacagtctagagactctggagctggataactaaaaataaaaatatatgccaaagattttcttggaaattagaagagcaaaatccaaattcaaagaaacagggcgtggggcgcacttttaaaagagaaagcgagacaggcccgtggacagtgattcccagacgggcagcggcaccatcctcacacctctgcattctgatagaagtctgaacagttgtttgtgttttttttttttttttttttgacgaagaatgtttttatttttatttttttcatgcatgcattctcaagaggtcgtgccaatcagccactgaaaggaaaggcatcactatggactttctctattttaaaatggtaacaatcagaggaactataagaacacctttagaaataaaaatactgggatcaaactggcctgcaaaaccatagtcagttaattctttttttcatccttcctctgaggggaaaaacaaaaaaaaacttaaaatacaaaaaacaacattctatttatttattgaggacccatggtaaaatgcaaatagatccggtgtctaaatgcattcatatttttatgattgttttgtaaatatctttgtatatttttctgcaataaataaatataaaaaatttagagaa

SEQ ID NO: 15 - DNA, 1634 bp, Homo sapiens
acccgagcaccttctcttcactcagccaactgctcgctcgctcacctccctcctctgcaccatgactacctgcagccgccagttcacctcctccagctccatgaagggctcctgcggcatcgggggcggcatcgggggcggctccagccgcatctcctccgtcctggccggagggtcctgccgcgcccccagcacctacgggggcggcctgtctgtctcatcctcccgcttctcctctgggggagcctacgggctggggggcggctatggcggtggcttcagcagcagcagcagcagctttggtagtggctttgggggaggatatggtggtggccttggtgctggcttgggtggtggctttggtggtggctttgctggtggtgatgggcttctggtgggcagtgagaaggtgaccatgcagaacctcaatgaccgcctggcctcctacctggacaaggtgcgtgctctggaggaggccaacgccgacctggaagtgaagatccgtgactggtaccagaggcagcggcctgctgagatcaaagactacagtccctacttcaagaccattgaggacctgaggaacaagattctcacagccacagtggacaatgccaatgtccttctgcagattgacaatgcccgtctggccgcggatgacttccgcaccaagtatgagacagagttgaacctgcgcatgagtgtggaagccgacatcaatggcctgcgcagggtgctggacgaactgaccctggccagagctgacctggagatgcagattgagagcctgaaggaggagctggcctacctgaagaagaaccacgaggaggagatgaatgccctgagaggccaggtgggtggagatgtcaatgtggagatggacgctgcacctggcgtggacctgagccgcattctgaacgagatgcgtgaccagtatgagaagatggcagagaagaaccgcaaggatgccgaggaatggttcttcaccaagacagaggagctgaaccgcgaggtggccaccaacagcgagctggtgcagagcggcaagagcgagatctcggagctccggcgcaccatgcagaacctggagattgagctgcagtcccagctcagcatgaaagcatccctggagaacagcctggaggagaccaaaggtcgctactgcatgcagctggcccagatccaggagatgattggcagcgtggaggagcagctggcccagctccgctgcgagatggagcagcagaaccaggagtacaagatcctgctggacgtgaagacgcggctggagcaggagatcgccacctaccgccgcctgctggagggcgaggacgcccacctctcctcctcccagttctcctctggatcgcagtcatccagagatgtgacctcctccagccgccaaatccgcaccaaggtcatggatgtgcacgatggcaaggtggtgtccacccacgagcaggtccttcgcaccaagaactgaggctgcccagccccgctcaggcctaggaggccccccgtgtggacacagatcccactggaagatcccctctcctgcccaagcacttcacagctggaccctgcttcaccctcaccccctcctggcaatcaatacagcttcattatctgagttgcat

SEQ ID NO: 16 - DNA, 8464 bp, Homo sapiens
ggaaggggcccggatgtactgaggatgcgttacagtttcactcgaggaggcagtagtggaaaggagcagtttttggggtttgatgccataatgggaatcaggtaatcgtcggcggggaagaagaaacgctgcagaccacggcttcctcgaatcttgcgcgaaagccgccggcctcggaggagggattaatccagacccgccggggggtgttttcacatttcttcctcttcgtggctgctcctcctattaaaaccatttttggtccatggtcaatgagaatacgaggatgtacattccagaggaaaaccaccaaggttccaactatgggagcccacgccccgcccatgccaacatgaatgccaatgcggcagcggggctggcccctgagcacatccccaccccgggggctgccctgtcgtggcaggcggccatcgacgcagcccggcaggctaagctgatgggcagcgctggcaatgcgaccatctccacagtcagctccacgcagcggaagcggcagcaatatgggaaacccaagaagcagggcagcaccacggccacacgcccgccccgagccctgctctgcctgaccctgaagaaccccatccggagggcctgcatcagcattgtcgaatggaaatcatttgaaataattattttactgactatttttgccaattgtgtggccttagcgatctatattccctttccagaagatgattccaacgccaccaattccaacctggaacgagtggaatatctctttctcataatttttacggtggaagcgtttttaaaagtaatcgcctatggactcctctttcaccccaatgcctacctccgcaacggctggaacctactagattttataattgtggttgtggggctttttagtgcaattttagaacaagcaaccaaagcagatggggcaaacgctctcggagggaaaggggccggatttgatgtgaaggcgctgagggccttccgcgtgctgcgccccctgcggctggtgtccggagtcccaagtctccaggtggtcctgaattccatcatcaaggccatggtccccctgctgcacatcgccctgcttgtgctgtttgtcatcatcatctacgccatcatcggcttggagctcttcatggggaagatgcacaagacctgctacaaccaggagggcatagcagatgttccagcagaagatgacccttccccttgtgcgctggaaacgggccacgggcggcagtgccagaacggcacggtgtgcaagcccggctgggatggtcccaagcacggcatcaccaactttgacaactttgccttcgccatgctcacggtgttccagtgcatcaccatggagggctggacggacgtgctgtactgggtcaatgatgccgtaggaagggactggccctggatctattttgttacactaatcatcatagggtcattttttgtacttaacttggttctcggtgtgcttagcggagagttttccaaagagagggagaaggccaaggcccggggagatttccagaagctgcgggagaagcagcagctagaagaggatctcaaaggctacctggattggatcactcaggccgaagacatcgatcctgagaatgaggacgaaggcatggatgaggagaagccccgaaacatgagcatgcccaccagtgagaccgagtccgtcaacaccgaaaacgtggctggaggtgacatcgagggagaaaactgcggggccaggctggcccaccggatctccaagtcaaagttcagccgctactggcgccggtggaatcggttctgcagaaggaagtgccgcgccgcagtcaagtctaatgtcttctactggctggtgattttcctggtgttcctcaacacgctcaccattgcctctgagcactacaaccagcccaactggctcacagaagtccaagacacggcaaacaaggccctgctggccctgttcacggcagagatgctcctgaagatgtacagcctgggcctgcaggcctacttcgtgtccctcttcaaccgctttgactgcttcgtcgtgtgtggcggcatcctggagaccatcctggtggagaccaagatcatgtccccactgggcatctccgtgctcagatgcgtccggctgctgaggattttcaagatcacgaggtactggaactccttgagcaacctggtggcatccttgctgaactctgtgcgctccatcgcctccctgctccttctcctcttcctcttcatcatcatcttctccctcctggggatgcagctctttggaggaaagttcaactttgatgagatgcagacccggaggagcacattcgataacttcccccagtccctcctcactgtgtttcagatcctgaccggggaggactggaattcggtgatgtatgatgggatcatggcttatggcggcccctcttttccagggatgttagtctgtatttacttcatcatcctcttcatctgtggaaactatatcctactgaatgtgttcttggccattgctgtggacaacctggctgatgctgagagcctcacatctgcccaaaaggaggaggaagaggagaaggagagaaagaagctggccaggactgccagcccagagaagaaacaagagttggtggagaagccggcagtgggggaatccaaggaggagaagattgagctgaaatccatcacggctgacggagagtctccacccgccaccaagatcaacatggatgacctccagcccaatgaaaatgaggataagagcccctaccccaacccagaaactacaggagaagaggatgaggaggagccagagatgcctgtcggccctcgcccacgaccactctctgagcttcaccttaaggaaaaggcagtgcccatgccagaagccagcgcgtttttcatcttcagctctaacaacaggtttcgcctccagtgccaccgcattgtcaatgacacgatcttcaccaacctgatcctcttcttcattctgctcagcagcatttccctggctgctgaggacccggtccagcacacctccttcaggaaccatattctgttttattttgatattgtttttaccaccattttcaccattgaaattgctctgaagatgactgcttatggggctttcttgcacaagggttctttctgccggaactacttcaacatcctggacctgctggtggtcagcgtgtccctcatctcctttggcatccagtccagtgcaatcaatgtcgtgaagatcttgcgagtcctgcgagtactcaggcccctgagggccatcaacagggccaaggggctaaagcatgtggttcagtgtgtgtttgtcgccatccggaccatcgggaacatcgtgattgtcaccaccctgctgcagttcatgtttgcctgcatcggggtccagctcttcaagggaaagctgtacacctgttcagacagttccaagcagacagaggcggaatgcaagggcaactacatcacgtacaaagacggggaggttgaccaccccatcatccaaccccgcagctgggagaacagcaagtttgactttgacaatgttctggcagccatgatggccctcttcaccgtctccaccttcgaagggtggccagagctgctgtaccgctccatcgactcccacacggaagacaagggccccatctacaactaccgtgtggagatctccatcttcttcatcatctacatcatcatcatcgccttcttcatgatgaacatcttcgtgggcttcgtcatcgtcacctttcaggagcagggggagcaggagtacaagaactgtgagctggacaagaaccagcgacagtgcgtggaatacgccctcaaggcccggcccctgcggaggtacatccccaagaaccagcaccagtacaaagtgtggtacgtggtcaactccacctacttcgagtacctgatgttcgtcctcatcctgctcaacaccatctgcctggccatgcagcactacggccagagctgcctgttcaaaatcgccatgaacatcctcaacatgctcttcactggcctcttcaccgtggagatgatcctgaagctcattgccttcaaacccaagcactatttctgtgatgcatggaatacatttgacgccttgattgttgtgggtagcattgttgatatagcaatcaccgaggtaaacccagctgaacatacccaatgctctccctctatgaacgcagaggaaaactcccgcatctccatcaccttcttccgcctgttccgggtcatgcgtctggtgaagctgctgagccgtggggagggcatccggacgctgctgtggaccttcatcaagtccttccaggccctgccctatgtggccctcctgatcgtgatgctgttcttcatctacgcggtgatcgggatgcaggtgtttgggaaaattgccctgaatgataccacagagatcaaccggaacaacaactttcagaccttcccccaggccgtgctgctcctcttcaggtgtgccaccggggaggcctggcaggacatcatgctggcctgcatgccaggcaagaagtgtgccccagagtccgagcccagcaacagcacggagggtgaaacaccctgtggtagcagctttgctgtcttctacttcatcagcttctacatgctctgtgccttcctgatcatcaacctctttgtagctgtcatcatggacaactttgactacctgacaagggactggtccatccttggtccccaccacctggatgagtttaaaagaatctgggcagagtatgaccctgaagccaagggtcgtatcaaacacctggatgtggtgaccctcctccggcggattcagccgccactaggttttgggaagctgtgccctcaccgcgtggcttgcaaacgcctggtctccatgaacatgcctctgaacagcgacgggacagtcatgttcaatgccaccctgtttgccctggtcaggacggccctgaggatcaaaacagaagggaacctagaacaagccaatgaggagctgcgggcgatcatcaagaagatctggaagcggaccagcatgaagctgctggaccaggtggtgccccctgcaggtgatgatgaggtcaccgttggcaagttctacgccacgttcctgatccaggagtacttccggaagttcaagaagcgcaaagagcagggccttgtgggcaagccctcccagaggaacgcgctgtctctgcaggctggcttgcgcacactgcatgacatcgggcctgagatccgacgggccatctctggagatctcaccgctgaggaggagctggacaaggccatgaaggaggctgtgtccgctgcttctgaagatgacatcttcaggagggccggtggcctgttcggcaaccacgtcagctactaccaaagcgacggccggagcgccttcccccagaccttcaccactcagcgcccgctgcacatcaacaaggcgggcagcagccagggcgacactgagtcgccatcccacgagaagctggtggactccaccttcaccccgagcagctactcgtccaccggctccaacgccaacatcaacaacgccaacaacaccgccctgggtcgcctccctcgccccgccggctaccccagcacggtcagcactgtggagggccacgggccccccttgtcccctgccatccgggtgcaggaggtggcgtggaagctcagctccaacaggtgccactcccgggagagccaggcagccatggcgggtcaggaggagacgtctcaggatgagacctatgaagtgaagatgaaccatgacacggaggcctgcagtgagcccagcctgctctccacagagatgctctcctaccaggatgacgaaaatcggcaactgacgctcccagaggaggacaagagggacatccggcaatctccgaagaggggtttcctccgctctgcctcactaggtcgaagggcctccttccacctggaatgtctgaagcgacagaaggaccgagggggagacatctctcagaagacagtcctgcccttgcatctggttcatcatcaggcattggcagtggcaggcctgagccccctcctccagagaagccattcccctgcctcattccctaggccttttgccaccccaccagccacacctggcagccgaggctggcccccacagcccgtccccaccctgcggcttgagggggtcgagtccagtgagaaactcaacagcagcttcccatccatccactgcggctcctgggctgagaccacccccggtggcgggggcagcagcgccgcccggagagtccggcccgtctccctcatggtgcccagccaggctggggccccagggaggcagttccacggcagtgccagcagcctggtggaagcggtcttgatttcagaaggactggggcagtttgctcaagatcccaagttcatcgaggtcaccacccaggagctggccgacgcctgcgacatgaccatagaggagatggagagcgcggccgacaacatcctcagcgggggcgccccacagagccccaatggcgccctcttaccctttgtgaactgcagggacgcggggcaggaccgagccgggggcgaagaggacgcgggctgtgtgcgcgcgcggggtcgaccgagtgaggaggagctccaggacagcagggtctacgtcagcagcctgtagtgggcgctgccagatgcgggcttttttttatttgtttcaatgttcctaatgggttcgtttcagaagtgcctcactgttctcgtgacctggagttaaccggaacagcgtcttcattcatttctgttgggaccagacgcggagcctgggtgcgcgagccgccctccgggaggaaggcgcccggctgcgtctgcagaggcggggagaggaggcggcgagggtcccggggcgcgaggaaggcgcctgccctctcccagctcgcaggccccgggcccggccgcgcctctgcggggagagcaccccggcttcccgcgcgccctcaccaaaaggaccctacagcaaacgggtgtctttcgactctgcttgtagaaaccatttgcacatattctgtacgagcctcgctgtctccctagagccagggccctgcggatttggagaagggagcggggcaggacttccaggaggaccccaacccggcccggagagggaggaggaggcctccaggggcgcggagctctggggatgggcgtcgggccggcagtggtgcggctcactccgtccctgcccacctgcgacgggatcccccgaccggcacgggccacgccgagctcccggccagccgccggcccgcaggcagcgcgagggaggagctgcgccgccgggaaggggccgccggctccgcccaaccaggtggtgctgagcttccgctgagcgctcttttgttttgtggtttgacacttttcttgacagcatgttgcagtttcttttcggttttggttttttttaaatgttttattttgctttcccagcgggaggggaggaagaagagtgtttacaaagtcctgtagccccctcacctttctgttttcacttttgccaatgtacatcgggtttggttttcttgtattatttaaacggttgtggtttcctttttccacggaggttcaatagaagccgctgcaggagagttttaccaaccattgtgtatgcccaataatttgttatcatttccttaggtagtaacctatttttgttctggtttggttcggttatctaatggaaaggtaactggcaatgcacttgatgtggtcttgcacatgtgggtgatagagttgggttcctttttatgctgggtgtacaggtgggtttgggagagaggagcatgcgcgagagagtctccgagtgtgtgcgacgcgtgtgtgtgtggtgggttgtctgtgtgcatatgtcctgcccgtgtatatgcacccacaccatgtgcccgtgcacaccagtgactacgcagtcccccctttctggtttagctgtgggaagatctgaatctggggccgtttgaaagcaaaaacaaaccactgtctctgcttctgaaacgggaatcagtaactctttgcattttctgtcccacaagatatgcaaaaacaatgcaataatattcatttaaaaatacaattgtgagttgtgttggcattaaaactgtattttaaaaaaagacagaaatttaagggaaaaacacaagaaggcattttgcttcaatatattccgtgtaatgttttattgcattgataatgtttctgttgaagaaaccgttatacttgaattcaggtcagtttcagtatttttcaaatatttttttaaaactgaattgcaattgtgccaagcgaatataatgaattgaattaagttggttttcggattcacttcttgtatattttgctgcatgtaaagtaaatcattttgtatttggagtgtgacaagctttaaaaaaaaaaaaaaaaaaaaaaaaaa

SEQ ID NO: 17 - DNA, 2714 bp, Homo sapiens
gggtggggggagcggtgatctgagctccgagcagctggtcttcgcggctcgctccctccttcgcgctctctcgctccctgccgccgcccgcagggctgcggggctcggtggcatctcccgggcgcggcccgcagtccttgcccctgcctccgggccgctcccgcccccggcgccgctcgctcccccgacccggactcccccatgtatgacgactcctacgtgcccgggtttgaggactcggaggcgggttcagccgactcctacaccagccgcccatctctggactcagacgtctccctggaggaggaccgggagagtgcccggcgtgaagtagagagccaggctcagcagcagctcgaaagggccaagcacaaacctgtggcatttgcggtgaggaccaatgtcagctactgtggcgtactggatgaggagtgcccagtccagggctctggagtcaactttgaggccaaagattttctgcacattaaagagaagtacagcaatgactggtggatcgggcggctagtgaaagagggcggggacatcgccttcatccccagcccccagcgcctggagagcatccggctcaaacaggagcagaaggccaggagatctgggaacccttccagcctgagtgacattggcaaccgacgctcccctccgccatctctagccaagcagaagcaaaagcaggcggaacatgttcccccatatgacgtggtgccctccatgcggcctgtggtgctggtgggaccctctctgaaaggttatgaggtcacagacatgatgcagaaggctctcttcgacttcctcaaacacagatttgatggcaggatctccatcacccgagtcacagccgacctctccctggcaaagcgatctgtgctcaacaatccgggcaagaggaccatcattgagcgctcctctgcccgctccagcattgcggaagtgcagagtgagatcgagcgcatatttgagctggccaaatccctgcagctagtagtgttggacgctgacaccatcaaccacccagcacagctggccaagacctcgctggcccccatcatcgtctttgtcaaagtgtcctcaccaaaggtactccagcgtctcattcgctcccgggggaagtcacagatgaagcacctgaccgtacagatgatggcatatgataagctggttcagtgcccaccggagtcatttgatgtgattctggatgagaaccagctggaggatgcctgtgagcacctggctgagtacctggaggtttactggcgggccacgcaccacccagcccctggccccggacttctgggtcctcccagtgccatccccggacttcagaaccagcagctgctgggggagcgtggcgaggagcactccccccttgagcgggacagcttgatgccctctgatgaggccagcgagagctcccgccaagcctggacaggatcttcacagcgtagctcccgccacctggaggaggactatgcagatgcctaccaggacctgtaccagcctcaccgccaacacacctcggggctgcctagtgctaacgggcatgacccccaagaccggcttctagcccaggactcagagcacaaccacagtgaccggaactggcagcgcaaccggccttggcccaaggatagctactgacagcctcctgctgccctaccctggcaggcacaggcgcagctggctggggggcccactccaggcagggtggcgttagactggcatcaggctggcactaggctcagcccccaaaaccccctgcccagccccagcttcagggctgcctgtggtcccaaggttctgggagaaacaggggaccccctcacctcctgggcagtgacccctactaggctcccattccaggtactagctgtgtgttctgcacccctggcaccttcctctcctcccacacaggaagctgccccactgggcagtgccctcaggccaggatccccttagcagggtccttcccaccagactcagggaagggatgccccattaaagtgacaaaagggtggggtgtgggcaccatggcatgaggaagaaacaaggtccctgagcaggcacaagtcctgacagtcaagggactgctttggcatccagggcctccagtcacctcactgccatacattagaaatgagacaatcaaagcccccccagggtggcacacccatctgtttgctggggtgtggcagccacatccaagactggagcagcaggctggccacgctcgggccagagagagctcacagctgaagctcttggagggaagggctctcctcaccctgccaggaagcttcttaacatgtgacaggaccagggaccaggagcatggtgaagccaagtggcagatgggagccaacctggatgggggtttggggaaggagggcatgtgtagcagagaacttaggggggcctccttgcctttctcattcttttgccctgcatcctgtcatttctgttcttgtccctcatacatctttggagaaccgggctccagactttgttccctgactcatagctgccgcttgttaggttagggttagatggggagagacagggcacagaggacctgtctccccggctactcttgccttatggctctagtgtgtgacctacagagcatgctccacaagcccctgcctcacctcactgtcatcactaataaacatcatgcacagtcaaaaaaaaaaaaaaaa

SEQ ID NO: 18 - DNA, 1585 bp, Homo sapiens
gatggaacatagcacgtttctctctggcctggtactggctacccttctctcgcaagtgagccccttcaagatacctatagaggaacttgaggacagagtgtttgtgaattgcaataccagcatcacatgggtagagggaacggtgggaacactgctctcagacattacaagactggacctgggaaaacgcatcctggacccacgaggaatatataggtgtaatgggacagatatatacaaggacaaagaatctaccgtgcaagttcattatcgaatgtgccagagctgtgtggagctggatccagccaccgtggctggcatcattgtcactgatgtcattgccactctgctccttgctttgggagtcttctgctttgctggacatgagactggaaggctgtctggggctgccgacacacaagctctgttgaggaatgaccaggtctatcagcccctccgagatcgagatgatgctcagtacagccaccttggaggaaactgggctcggaacaagtgaacctgagactggtggcttctagaagcagccattaccaactgtaccttcccttcttgctcagccaataaatatatcctctttcactcagcaggtgcctgggcttcttaaggctcctgggcaaggcgtgggagttgtcctgacttgcttgggatctcgccctcctacctacctgtttcttccttcatctcctcccacctcagcttctcaagtagctctggcactacagacatgtgccactatgcctgaatatttttatttttgtgtagacacgggatctcactatgttgcctaggctggtcttggactcctgtactgaagcgatcctcccaccttgacctcccaaagtgctgggactataggtgtgagccactgtaccaggctatatatggtattaaaattttttaaatttccaattgtttattactagtatataaaaatacaattaatttttgaatattaatcaaaacaaaaagcaaaactgctacactcacttattaattctagtaactttttgtaagaccgttgagtattctacatagacaatcatgttgtctgtgaacaaaaacagtttgttttctttcctatctgggtgctttttgtttctgtttcttggcttattgcactggctagaacctccagtacaatgttgaatagaagtggagagaggacatccttgtcttgttcatgatcttaggaggaaagcattgtctttcatctttaagtacattagctgtgggtttttcttagatgtcctttaacagattgagctagttcttttctttctagtttgctgagaatttttatcaaaaatagatgttgggtctcgtcaagtgcttaccctgcatccattgagatgataatatggttttacttttttagtctgttaatatggtacattacattgatggcacgatatgttaaaccaacctttcattcctgaaaaaaactctagtcatttggtattattcttttgatatgttattagattaaatttattaaaattttgttaagaaaaaaaaaaaaaaaaaaaaaaaaaaaaaaaaaaaaaaaaaaaaaaaaaaaaaaaaa

SEQ ID NO: 19 - DNA, 4465 bp, Homo sapiens
caattgtcatacgacttgcagtgagcgtcaggagcacgtccaggaactcctcagcagcgcctccttcagctccacagccagacgccctcagacagcaaagcctacccccgcgccgcgccctgcccgccgctcggatgctcgcccgcgccctgctgctgtgcgcggtcctggcgctcagccatacagcaaatccttgctgttcccacccatgtcaaaaccgaggtgtatgtatgagtgtgggatttgaccagtataagtgcgattgtacccggacaggattctatggagaaaactgctcaacaccggaatttttgacaagaataaaattatttctgaaacccactccaaacacagtgcactacatacttacccacttcaagggattttggaacgttgtgaataacattcccttccttcgaaatgcaattatgagttatgtcttgacatccagatcacatttgattgacagtccaccaacttacaatgctgactatggctacaaaagctgggaagccttctctaacctctcctattatactagagcccttcctcctgtgcctgatgattgcccgactcccttgggtgtcaaaggtaaaaagcagcttcctgattcaaatgagattgtggaaaaattgcttctaagaagaaagttcatccctgatccccagggctcaaacatgatgtttgcattctttgcccagcacttcacgcatcagtttttcaagacagatcataagcgagggccagctttcaccaacgggctgggccatggggtggacttaaatcatatttacggtgaaactctggctagacagcgtaaactgcgccttttcaaggatggaaaaatgaaatatcagataattgatggagagatgtatcctcccacagtcaaagatactcaggcagagatgatctaccctcctcaagtccctgagcatctacggtttgctgtggggcaggaggtctttggtctggtgcctggtctgatgatgtatgccacaatctggctgcgggaacacaacagagtatgcgatgtgcttaaacaggagcatcctgaatggggtgatgagcagttgttccagacaagcaggctaatactgataggagagactattaagattgtgattgaagattatgtgcaacacttgagtggctatcacttcaaactgaaatttgacccagaactacttttcaacaaacaattccagtaccaaaatcgtattgctgctgaatttaacaccctctatcactggcatccccttctgcctgacacctttcaaattcatgaccagaaatacaactatcaacagtttatctacaacaactctatattgctggaacatggaattacccagtttgttgaatcattcaccaggcaaattgctggcagggttgctggtggtaggaatgttccacccgcagtacagaaagtatcacaggcttccattgaccagagcaggcagatgaaataccagtcttttaatgagtaccgcaaacgctttatgctgaagccctatgaatcatttgaagaacttacaggagaaaaggaaatgtctgcagagttggaagcactctatggtgacatcgatgctgtggagctgtatcctgcccttctggtagaaaagcctcggccagatgccatctttggtgaaaccatggtagaagttggagcaccattctccttgaaaggacttatgggtaatgttatatgttctcctgcctactggaagccaagcacttttggtggagaagtgggttttcaaatcatcaacactgcctcaattcagtctctcatctgcaataacgtgaagggctgtccctttacttcattcagtgttccagatccagagctcattaaaacagtcaccatcaatgcaagttcttcccgctccggactagatgatatcaatcccacagtactactaaaagaacgttcgactgaactgtagaagtctaatgatcatatttatttatttatatgaaccatgtctattaatttaattatttaataatatttatattaaactccttatgttacttaacatcttctgtaacagaagtcagtactcctgttgcggagaaaggagtcatacttgtgaagacttttatgtcactactctaaagattttgctgttgctgttaagtttggaaaacagtttttattctgttttataaaccagagagaaatgagttttgacgtctttttacttgaatttcaacttatattataagaacgaaagtaaagatgtttgaatacttaaacactatcacaagatggcaaaatgctgaaagtttttacactgtcgatgtttccaatgcatcttccatgatgcattagaagtaactaatgtttgaaattttaaagtacttttggttatttttctgtcatcaaacaaaaacaggtatcagtgcattattaaatgaatatttaaattagacattaccagtaatttcatgtctactttttaaaatcagcaatgaaacaataatttgaaatttctaaattcatagggtagaatcacctgtaaaagcttgtttgatttcttaaagttattaaacttgtacatataccaaaaagaagctgtcttggatttaaatctgtaaaatcagatgaaattttactacaattgcttgttaaaatattttataagtgatgttcctttttcaccaagagtataaacctttttagtgtgactgttaaaacttccttttaaatcaaaatgccaaatttattaaggtggtggagccactgcagtgttatctcaaaataagaatattttgttgagatattccagaatttgtttatatggctggtaacatgtaaaatctatatcagcaaaagggtctacctttaaaataagcaataacaaagaagaaaaccaaattattgttcaaatttaggtttaaacttttgaagcaaacttttttttatccttgtgcactgcaggcctggtactcagattttgctatgaggttaatgaagtaccaagctgtgcttgaataacgatatgttttctcagattttctgttgtacagtttaatttagcagtccatatcacattgcaaaagtagcaatgacctcataaaatacctcttcaaaatgcttaaattcatttcacacattaattttatctcagtcttgaagccaattcagtaggtgcattggaatcaagcctggctacctgcatgctgttccttttcttttcttcttttagccattttgctaagagacacagtcttctcatcacttcgtttctcctattttgttttactagttttaagatcagagttcactttctttggactctgcctatattttcttacctgaacttttgcaagttttcaggtaaacctcagctcaggactgctatttagctcctcttaagaagattaaaagagaaaaaaaaaggcccttttaaaaatagtatacacttattttaagtgaaaagcagagaattttatttatagctaattttagctatctgtaaccaagatggatgcaaagaggctagtgcctcagagagaactgtacggggtttgtgactggaaaaagttacgttcccattctaattaatgccctttcttatttaaaaacaaaaccaaatgatatctaagtagttctcagcaataataataatgacgataatacttcttttccacatctcattgtcactgacatttaatggtactgtatattacttaatttattgaagattattatttatgtcttattaggacactatggttataaactgtgtttaagcctacaatcattgatttttttttgttatgtcacaatcagtatattttctttggggttacctctctgaatattatgtaaacaatccaaagaaatgattgtattaagatttgtgaataaatttttagaaatctgattggcatattgagatatttaaggttgaatgtttgtccttaggataggcctatgtgctagcccacaaagaatattgtctcattagcctgaatgtgccataagactgaccttttaaaatgttttgagggatctgtggatgcttcgttaatttgttcagccacaatttattgagaaaatattctgtgtcaagcactgtgggttttaatatttttaaatcaaacgctgattacagataatagtatttatataaataattgaaaaaaattttcttttgggaagagggagaaaatgaaataaatatcattaaagataactcaggagaatcttctttacaattttacgtttagaatgtttaaggttaagaaagaaatagtcaatatgcttgtataaaacactgttcactgttttttttaaaaaaaaaacttgatttgttattaacattgatctgctgacaaaacctgggaatttgggttgtgtatgcgaatgtttcagtgcctcagacaaatgtgtatttaacttatgtaaaagataagtctggaaataaatgtctgtttatttttgtactattta

SEQ ID NO: 20 - DNA, 3119 bp, Homo sapiens
gtgacagaagtagtaggaagtgagctgttcagaggcaggagggtctattctttgccaaaggggggaccagaattccccatgcgagctgtttgaggactgggatgccgagaacgcgagcgatccgagcagggtttgtctgggcaccgtcggggtaggatccggaacgcattcggaaggctttttgcaagcatttacttggaaggagaacttgggatctttctgggaaccccccgccccggctggattggccgagcaagcctggaaaatggtaaatgatcatttggatcaattacaggcttttagctggcttgtctgtcataattcatgattcggggctgggaaaaagaccaacagcctacgtgccaaaaaaggggcagagtttgatggagttgggtggacttttctatgccatttgcctccacacctagaggataagcacttttgcagacattcagtgcaagggagatcatgtttgactgtatggatgttctgtcagtgagtcctgggcaaatcctggatttctacactgcgagtccgtcttcctgcatgctccaggagaaagctctcaaagcatgcttcagtggattgacccaaaccgaatggcagcatcggcacactgctcaatcaattgaaacacagagcaccagctctgaggaactcgtcccaagccccccatctccacttcctccccctcgagtgtacaaaccctgcttcgtctgccaggacaaatcatcagggtaccactatggggtcagcgcctgtgagggatgtaagggctttttccgcagaagtattcagaagaatatgatttacacttgtcaccgagataagaactgtgttattaataaagtcaccaggaatcgatgccaatactgtcgactccagaagtgctttgaagtgggaatgtccaaagaatctgtcaggaatgacaggaacaagaaaaagaaggagacttcgaagcaagaatgcacagagagctatgaaatgacagctgagttggacgatctcacagagaagatccgaaaagctcaccaggaaactttcccttcactctgccagctgggtaaatacaccacgaattccagtgctgaccatcgagtccgactggacctgggcctctgggacaaattcagtgaactggccaccaagtgcattattaagatcgtggagtttgctaaacgtctgcctggtttcactggcttgaccatcgcagaccaaattaccctgctgaaggccgcctgcctggacatcctgattcttagaatttgcaccaggtataccccagaacaagacaccatgactttctcagacggccttaccctaaatcgaactcagatgcacaatgctggatttggtcctctgactgaccttgtgttcacctttgccaaccagctcctgcctttggaaatggatgacacagaaacaggccttctcagtgccatctgcttaatctgtggagaccgccaggaccttgaggaaccgacaaaagtagataagctacaagaaccattgctggaagcactaaaaatttatatcagaaaaagacgacccagcaagcctcacatgtttccaaagatcttaatgaaaatcacagatctccgtagcatcagtgctaaaggtgcagagcgtgtaattaccttgaaaatggaaattcctggatcaatgccacctctcattcaagaaatgctggagaattctgaaggacatgaacccttgaccccaagttcaagtgggaacacagcagagcacagtcctagcatctcacccagctcagtggaaaacagtggggtcagtcagtcaccactcgtgcaataagacattttctagctacttcaaacattccccagtaccttcagttccaggatttaaaatgcaagaaaaaacatttttactgctgcttagtttttggactgaaaagatattaaaactcaagaaggaccaagaagttttcatatgtatcaatatatatactcctcactgtgtaacttacctagaaatacaaacttttccaattttaaaaaatcagccatttcatgcaaccagaaactagttaaaagcttctattttcctctttgaacactcaagatgcatggcaaagacccagtcaaaatgatttacccctggttaagtttctgaagactttgtacatacagaagtatggctctgttctttctatactgtatgtttggtgctttccttttgtcttgcatactcaaaataaccatgacaccaaggttatgaaatagactactgtacacgtctacctaggttcaaaaagataactgtcttgctttcatggaatagtcaagacatcaaggtaaggaaacaggactattgacaggactattgtacagtatgacaagataaggctgaagatattctactttagttagtatggaagcttgtctttgctctttctgatgctctcaaactgcatcttttatttcatgttgcccagtaaaagtatacaaattccctgcactagcagaagagaattctgtatcagtgtaactgccagttcagttaatcaaatgtcatttgttcaattgttaatgtcactttaaattaaaagtggtttattacttgtttaatgacataactacacagttagttaaaaaaaatttttttacagtaatgatagcctccaaggcagaaacacttttcagtgttaagtttttgtttacttgttcacaagccattagggaaatttcatgggataattagcaggctggtctaccactggaccatgtaactctagtgtccttcctgattcatgcctgatattgggatttttttccagcccttcttgatgccaagggctaattatattacatcccaaagaaacaggcatagaatctgcctcctttgaccttgttcaatcactatgaagcagagtgaaagctgtggtagagtggttaacagatacaagtgtcagtttcttagttctcatttaagcactactggaatttttttttttgatatattagcaagtctgtgatgtactttcactggctctgtttgtacattgagattgtttgtttaacaatgctttctatgttcatatactgtttacctttttccatggactctcctggcaaagaataaaatatatttatttt

SEQ ID NO: 21 - DNA, 398 bp, Homo sapiens
ctctccgccagaccgccgccgcgccgccatcatggacaccagccgtgtgcagcctatcaagctggccagggtcaccaaggtcctgggcaggaccggttctcagggacagtgcacgcaggtgcgcgtggaattcatggacgacacgagccgatccatcatccgcaatgtaaaaggccccgtgcgcgagggcgacgtgctcacccttttggagtcagagcgagaagcccggaggttgcgctgagcttggctgctcgctgggtcttggatgtcgggttcgaccacttggccgatgggaatggtctgtcacaatctgctccttttttttgtccgccacacgtaactgagatgctcctttaaataaagcgtttgtgtttcaagttaaaaaaaaaaaaaaaaaa

SEQ ID NO: 22 - DNA, 1521 bp, Homo sapiens
gctgggcccccggcggtaaccggagcgggggggccgcgccccccctcctcccccctcgccggtcccagagccgcagctgctgcgcccgcgcgctcccggggacattctaaccgccgccaggtcccgccgcctctcgccccgctattaataccggcggcccgggaggggggcgcagcacgcgccgcgcagccatggggaggctgctggccttagtggtcggcgcggcactggtgtcctcagcctgcgggggctgcgtggaggtggactcggagaccgaggccgtgtatgggatgaccttcaaaattctttgcatctcctgcaagcgccgcagcgagaccaacgctgagaccttcaccgagtggaccttccgccagaagggcactgaggagtttgtcaagatcctgcgctatgagaatgaggtgttgcagctggaggaggatgagcgcttcgagggccgcgtggtgtggaatggcagccggggcaccaaagacctgcaggatctgtctatcttcatcaccaatgtcacctacaaccactcgggcgactacgagtgccacgtctaccgcctgctcttcttcgaaaactacgagcacaacaccagcgtcgtcaagaagatccacattgaggtagtggacaaagccaacagagacatggcatccatcgtgtctgagatcatgatgtatgtgctcattgtggtgttgaccatatggctcgtggcagagatgatttactgctacaagaagatcgctgccgccacggagactgctgcacaggagaatgcctcggaatacctggccatcacctctgaaagcaaagagaactgcacgggcgtccaggtggccgaatagccctggccctgggccccgcctcaaggaagagccagccgtaatggggactctccaggcaccgcctgcccccagcgtgggggtggccactcctgggccccagaaagcctcagagtcctgccgacggagccactggggtgggagggggcagggggcttggctcgcacccccactttcgcctcctccagctcctgccccgccggccgcgcaccgccatgcatgatgggtaaagcaatactgccgctgcccccaccctgcttctgctgcctgtttggggaggggggcggtgaggtgggggcagcggccccgcacccctcctccttgctgatttgcacacattggccgcttcagacacgcacttctggggccagcccctccccgcctcctccctgcctggcggcaggggtcgcgatgatgggctggagcagtttggggcagggggttctgggacccactccgactccccctccccggcatcatttcccctcccgcttcctccggctggacctggggtcccccctccctgtaatgcactcctgccccggcccaacctcgccctctctcaccagccttgaactgtggccacctagaaaggggcccattcagcctcgtctctttacagaagtagttttgttcatgaaataaagactcttggacttgaaaaaaaaaaaaaaaa

SEQ ID NO: 23 - DNA, 5642 bp, Homo sapiens
cgcccgccgggcgctctcgcttcagtcagtcgggccgcgccgcgcctcagctctggttgatgataattagaagcatgctttccactgaacttcccgacaacatttgttatgcagaatgtctctgagtgagaactcggtttttgcctatgaatcttctgtgcatagcaccaatgttttactcagccttaatgaccagcggaagaaagatgtgctgtgcgatgtcaccatctttgtggagggacagcggttccgcgctcaccggtccgtgctggcggcatgcagcagttacttccactcaagaatcgtaggccaggctgatggagagctgaacattactcttccagaagaggtgacagttaaaggatttgaacctttaattcagtttgcctacactgctaaactgattttaagtaaagagaatgtggatgaagtgtgcaaatgtgtggagtttttaagtgtacataatattgaggaatcctgctttcagtttctgaaatttaagtttttggactccactgcagaccagcaagaatgcccaagaaaaaaatgcttttcatcacactgtcagaaaacagaccttaaactttcacttttggaccagagggatctagaaactgatgaagtggaggaatttctggaaaataaaaatgttcagactcctcagtgtaaactccgcaggtatcaaggaaatgcaaaagcctcacctcctctacaagacagtgccagtcagacatatgagtccatgtgcttagagaaggatgctgctctggccttgccttctttatgccccaaatacagaaaattccaaaaagcatttggaactgacagagtccgtactggggaatctagtgtcaaagacattcatgcttctgttcagccaaatgaaaggtctgaaaatgaatgcctgggaggagtcccggagtgtagagatttgcaggtgatgttaaaatgtgacgaaagtaaattagcaatggaacctgaagaaacgaagaaagatcctgcttctcagtgcccaactgaaaaatcagaagtgactcctttcccccacaattcttccatagaccctcatggactttattctttgtctcttttacacacatatgaccaatatggtgacttgaattttgctggtatgcaaaacacaacagtgttaacagaaaagcctttgtcaggtacagacgtccaagaaaaaacatttggtgaaagtcaggatttacctttgaaatccgacttgggcaccagggaagatagtagtgttgcatctagtgataggagtagtgtggagcgagaagtggcagaacacctagcaaaaggcttctggagtgacatttgcagcacggacactccttgccaaatgcagttatcacctgctgtggccaaagatggctcagaacagatctcacagaaacggtctgagtgtccgtggttaggtatcaggattagtgagagcccagaaccaggtcaaaggactttcacaacattaagttctgtcaactgcccttttataagtactctgagtactgaaggctgttcaagcaatttggaaattggaaacgatgattatgtttcagaaccccagcaagaaccttgcccatatgcttgtgtcattagcttgggagacgactctgagacggacaccgaaggagacagtgaatcctgttcagccagagaacaagaatgtgaggtaaaactgccattcaatgcacaacggataatttcactgtctcgaaatgattttcagtccttgttgaaaatgcacaagcttactccagaacagctggattgtatccatgatattcgaagaagaagtaaaaacagaattgctgcacagcgctgtcgcaagagaaaacttgactgtatacagaatcttgaatcagaaattgagaagctgcaaagtgaaaaggagagcttgttgaaggaaagagatcacattttgtcaactctgggtgagacaaagcagaacctaactggactttgccagaaagtttgtaaagaagcagctctgagtcaagaacaaatacagatactcgccaagtactcagctgcagattgcccactttcatttttaatttctgaaaaagataaaagtactcctgatggtgaactggcgttaccatcaattttcagtttatctgaccggcctccagcagtgctgcctccctgtgccagaggaaacagtgagcctggctacgcgcgagggcaggagtcccagcagatgtccacagccacctctgagcaagctgggcctgcggaacagtgtcgtcagagtggtgggatctcagatttctgtcagcagatgactgataaatgtactactgatgagtaaacttgcattcacttccttcaaaccatctaattttctcctgaagttttggcagcgtcttgaaagcctaatatgaccatctgttgctcaacaatactgtttttttcctttagtagtttaccataagggaatttcctttaagtcaaccatgatttctccttgatttctacaagagacaaagaaatgattttgcctcctggatatcagaaaaatccatgtgaaaatgtagtaaacctttaaaactcatgttttaaagaataataactctagtaataactcttcctgctattcagaataagtaggagaatgaaaactgcagcatatcagacagcaatttaacagcttgaaacatctacagatagttcctactaaaagaagtggcctgcagaagtttaataatttgacttttttctaatattttagtttgaaagaaaatttcttcccaagcaatgctaatagagttctattcttagaagcagggtgtcagctactgggaatatttttgtagagctgcattgtgaaaaaaagatggtcttacctgaatcttagggctttgttcttcggctcctaaaatcaggctttaagctacattgggaagatttagtaaataggcaagtggttggcctaagacgggggctgcttctcctcttcagtatggactctagaaagtctggctacatgaatagatttaagtgtcactttccctccctgccccccgcttcagtctctaccatatctggtcccatcatggacttcctatttcctggcatttttgtccctttggaagaagaaataggactcagaatacagtggcatgagtgattacactggcagcattatctcaggctccctagaatctggagagcttaccaacatgtaaagctgttcatttttccaccgtgggtcaccaatgccagaaaaccagacatcacggggaaagaatgttgcttactttttaccaggagtgcagttcatttttttcaccctgtttttgaagtcgtattattcacttgtaaaaatgattgtaacagataaaaaatgtatctgcagcaactctgcaggtttgtgaaataggatgaaactcaatctttttctattgtgggtttgcatttgaaaagcaggttgaatccttgctctcttctccaaatttggtgtggtataaagacacacaaatcattttaacttggacatttaaagatcagtcttagtgtttgttcagtcctgttacaaaatagataactgagcacctatcgcataacattttgcggtggcttttagccatgctggggttagatgtgtttgagagtcaaatgaaagctatggatcttctcagcaattaaaaaaaatgcatatattcacattcacagaaacattggcagaacccagttttaatggtacagaggagtagtttatagtgttgatttcaccaaaatcagagggctgaaagagacacttctatagactgcatcctgagcctagtgcagggcttgtctagctaatgtgggcagccaccacccactgtgtatgaacaagtctgaagcaagttggccttgcccttgagagtatatggggaccagtcttcatgtcttggagtaatttgtcaaatgttaccctttttgatcagggtgtagggggaggatattgctagtatattttcagtggtttgtatgttctctctgtcactgacttatttgtaagagaaaattagttggacttgtttattttctagtagcttttataagtacactcaagaatttgtcagggagaataattctgatagtgcatcccatactgcaaaagaatttgtgtgtgtgtgtgtgtgtgtgtgtgtgtgtgtgtatgtgtatgtatacatatatatctctccatataggtatttctttgatacttgtaattttaaatttcagcttcacgatataaaataatataagaacttctggtttacaaaatgtaaaatcttaagccaatggaacccttgatttcctacctcagtgtacacccaactattggttgtatcagtttgtgtatgtgcaaatgtcaaataatcttttgctttaattgctactgtacttgctttgaaagattacctactattttatgataaaatgtagttgtctccagagcttaaatataatttgtaaagcacttggtttaaatttctctctacctataaacagtttagcattaagggtttctattaatgacacagaattattggccaagtgtaatttcttaaaatttagcattactttaaatagccagcatgtaatacaagtaactacactacctcatatctacatgattttcaagttgtaatgcagatggacagataaaaaagattttacgtttgtcttttggccataagtgggaaagttttctgtatattgcatagcattacacatttatgcctattttaacattaacttctaaagaagttttttctaagaaaatgtttcaaggcaatattttttttgaggctgccgaagacaaatgacaggattatgagtatacagtgtatgccttttccttcatgcagaattttgaaatgttttcagtttgtatattgcatattcacatgatcattgttcactattttatgaactggccttctcaatgtttgatgattttttaaaagctgttatgttgaattcagtaaaataacattaccttattttttttcttattcaaattctggaactatagcaaataattcgttaaattgtcatattcaaaacaaatgtggatacagtcttggttctccatctgtaattttttttaacagtttgctatagcttactgcttaactaattttaaataaggaaataagtatgttagatgcagtagacgatacaggttgcatgtggacactcagtcacattaacaacttgggaaaaaaatggcaatgttacggtgaattctcaggtgaacttttttcagttataaaacatctattttgaatctgtaaatattttaaatgttttattaaggcatgtaataaactattctttgaaacttgttgggtagaatgaaaattaaagccataatggtagaagatggcatactgattataaaagaagcagaaaaacattgatttttttatatctttcataatataattttctaacaatgcaataaaaccactaaacttttgtgtccatattttactgagaccatgtttcattaaaagcatagtttcatagtatttaatttacatttctccctaatgttcttacccaaatgtacctgaactaaaaaatgttagatgttggtgataagttgacagttaaataaaattctctaaaattgcttctaattgaaa

SEQ ID NO: 24 - DNA, 1547 bp, Homo sapiens
ggggacttcttgaacttgcagggagaataacttgcgcaccccactttgcgccggtgcctttgccccagcggagcctgcttcgccatctccgagccccaccgcccctccactcctcggccttgcccgacactgagacgctgttcccagcgtgaaaagagagactgcgcggccggcacccgggagaaggaggaggcaaagaaaaggaacggacattcggtccttgcgccaggtcctttgaccagagtttttccatgtggacgctctttcaatggacgtgtccccgcgtgcttcttagacggactgcggtctcctaaaggtcgaccatggtggccgggacccgctgtcttctagcgttgctgcttccccaggtcctcctgggcggcgcggctggcctcgttccggagctgggccgcaggaagttcgcggcggcgtcgtcgggccgcccctcatcccagccctctgacgaggtcctgagcgagttcgagttgcggctgctcagcatgttcggcctgaaacagagacccacccccagcagggacgccgtggtgcccccctacatgctagacctgtatcgcaggcactcaggtcagccgggctcacccgccccagaccaccggttggagagggcagccagccgagccaacactgtgcgcagcttccaccatgaagaatctttggaagaactaccagaaacgagtgggaaaacaacccggagattcttctttaatttaagttctatccccacggaggagtttatcacctcagcagagcttcaggttttccgagaacagatgcaagatgctttaggaaacaatagcagtttccatcaccgaattaatatttatgaaatcataaaacctgcaacagccaactcgaaattccccgtgaccagacttttggacaccaggttggtgaatcagaatgcaagcaggtgggaaagttttgatgtcacccccgctgtgatgcggtggactgcacagggacacgccaaccatggattcgtggtggaagtggcccacttggaggagaaacaaggtgtctccaagagacatgttaggataagcaggtctttgcaccaagatgaacacagctggtcacagataaggccattgctagtaacttttggccatgatggaaaagggcatcctctccacaaaagagaaaaacgtcaagccaaacacaaacagcggaaacgccttaagtccagctgtaagagacaccctttgtacgtggacttcagtgacgtggggtggaatgactggattgtggctcccccggggtatcacgccttttactgccacggagaatgcccttttcctctggctgatcatctgaactccactaatcatgccattgttcagacgttggtcaactctgttaactctaagattcctaaggcatgctgtgtcccgacagaactcagtgctatctcgatgctgtaccttgacgagaatgaaaaggttgtattaaagaactatcaggacatggttgtggagggttgtgggtgtcgctagtacagcaaaattaaatacataaatatatatata

SEQ ID NO: 25 - DNA, 1128 bp, Homo sapiens
gcgtgggcagggggcgggcccgggagttggaacagagggcacagacggcccctcctcggaggggagggaccggagccggggcctttttctttaagactcgcagcactggatcccagaacttagtctgcgcggcggcattgacactagctgggctcctcggggcgcgccccaggtggtccgaagcccggtccgccctccacgcaggtgccccgcgctccccgctcagccatgtcgtcctgcagccgcgtggcgctggtgaccggggccaacaggggcatcggcttggccatcgcgcgcgaactgtgccgacagttctctggggatgtggtgctcaccgcgcgggacgtggcgcggggccaggcggccgtgcagcagctgcaggcggagggcctgagcccgcgcttccaccaactggacatcgacgacttgcagagcatccgcgccctgcgcgacttcctgcgcaaggagtacggggggctcaacgtactggtcaacaacgcggccgtcgccttcaagagtgatgatccaatgccctttgacattaaagctgagatgacactgaagacaaatttttttgccactagaaacatgtgcaacgagttactgccgataatgaaacctcatgggagagtggtgaatatcagtagtttgcagtgtttaagggcttttgaaaactgcagtgaagatctgcaggaaaggttccacagtgagacactcacagaaggagacctggtggatctcatgaaaaagtttgtggaggacacaaaaaatgaggtgcatgagagggaaggctggcccaactcaccttatggggtgtccaagttgggggtcacggtcttatcgaggatcctggccaggcgtctggatgagaagaggaaagctgacaggattctggtgaatgcgtgctgcccaggaccagtgaagacagacatggatgggaaagacagcatcaggactgtggaggagggggctgagacccctgtctacttggccctcttgcctccagatgccactgagccacaaggccagttggtccatgacaaagttgtgcaaaactggtaaacgtctgcttcggagcttgctgcttaataaatgttggtggaatgaatgaaaaaaaaaaaaaaaaaa

SEQ ID NO: 26 - DNA, 11611 bp, Homo sapiens
ggcttcagccctgcagggaaagaaaagtgcaatgattctggactgagacgcgcttgggcagaggctatgtaatcgtgtctgtgttgaggacttcgcttcgaggagggaagaggagggatcggctcgctcctccggcggcggcggcggcggcgactctgcaggcggagtttcgcggcggcggcaccagggttacgccagccccgcggggaggtctctccatccagcttctgcagcggcgaaagccccagcgcccgagcgcctgagccggcggggagcaagtaaagctagaccgatctccggggagccccggagtaggcgagcggcggccgccagctagttgagcgcaccccccgcccgccccagcggcgccgcggcgggcggcgtccaggcggcatggagaaggacggcctgtgccgcgctgaccagcagtacgaatgcgtggcggagatcggggagggcgcctatgggaaggtgttcaaggcccgcgacttgaagaacggaggccgtttcgtggcgttgaagcgcgtgcgggtgcagaccggcgaggagggcatgccgctctccaccatccgcgaggtggcggtgctgaggcacctggagaccttcgagcaccccaacgtggtcaggttgtttgatgtgtgcacagtgtcacgaacagacagagaaaccaaactaactttagtgtttgaacatgtcgatcaagacttgaccacttacttggataaagttccagagcctggagtgcccactgaaaccataaaggatatgatgtttcagcttctccgaggtctggactttcttcattcacaccgagtagtgcatcgcgatctaaaaccacagaacattctggtgaccagcagcggacaaataaaactcgctgacttcggccttgcccgcatctatagtttccagatggctctaacctcagtggtcgtcacgctgtggtacagagcacccgaagtcttgctccagtccagctacgccacccccgtggatctctggagtgttggctgcatatttgcagaaatgtttcgtagaaagcctctttttcgtggaagttcagatgttgatcaactaggaaaaatcttggacgtgattggactcccaggagaagaagactggcctagagatgttgcccttcccaggcaggcttttcattcaaaatctgcccaaccaattgagaagtttgtaacagatatcgatgaactaggcaaagacctacttctgaagtgtttgacatttaacccagccaaaagaatatctgcctacagtgccctgtctcacccatacttccaggacctggaaaggtgcaaagaaaacctggattcccacctgccgcccagccagaacacctcggagctgaatacagcctgaggcctcagcagccgccttaagctgatcctgcggagaacacccttggtggcttatgggtccccctcagcaagccctacagagctgtggaggattgctatctggaggccttccagctgctgtcttctggacaggctctgcttctccaaggaaaccgcctagtttactgttttgaaatcaatgcaagagtgattgcagctttatgttcatttgtttgtttgtttgtctgtttgtttcaagaacctggaaaaattccagaagaagagaagctgctgaccaattgtgctgccatttgatttttctaaccttgaatgctgccagtgtggagtgggtaatccaggcacagctgagttatgatgtaatctctctgcagctgccgggcctgatttggtacttttgagtgtgtgtgtgcatgtgtgtgtgtgtgtgtgtgtgtgtgtgtgtgtatgtgagagattctgtgatcttttaaagtgttactttttgtaaacgacaagaataattcaattttaaagactcaaggtggtcagtaaataacaggcatttgttcactgaaggtgattcaccaaaatagtcttctcaaattagaaagttaaccccatgtcctcagcatttcttttctggccaaaagcagtaaatttgctagcagtaaaagatgaagttttatacacacagcaaaaaggagaaaaaattctagtatattttaagagatgtgcatgcattctatttagtcttcagaatgctgaatttacttgttgtaagtctattttaaccttctgtatgacatcatgctttatcatttcttttggaaaatagcctgtaagctttttattacttgctataggtttagggagtgtacctcagatagattttaaaaaaaagaatagaaagcctttatttcctggtttgaaattcctttcttccctttttttgttgttgttattgttgtttgttgttgttattttgtttttgtttttaggaatttgtcagaaactctttcctgttttggtttggagagtagttctctctaactagagacaggagtggccttgaaattttcctcatctattacactgtactttctgccacacactgccttgttggcaaagtatccatcttgtctatctcccggcacttctgaaatatattgctaccattgtataactaataacagattgcttaagctgttcccatgcaccacctgtttgcttgctttcaatgaacctttcataaattcgcagtctcagcttatggtttatggcctcgattctgcaaacctaacagggtcacatatgttctctaatgcagtccttctacctggtgtttacttttgctacccaaataatgagtaggatcttgttttcgtatacccccaccactcccattgctaccaactgtcaccttgtgcactccttttttatagaagatattttcagtgtctttacctgagggtatgtctttagctatgttttagggccatacatttactctatcaaatgatcttttctccatcccccaggctgtgcttatttctagtgccttgtgctcactcctgctctctacagagccagcctggcctgggcattgtaaacagcttttcctttttctcttactgttttctctacagtcctttatatttcataccatctctgccttataagtggtttagtgctcagttggctctagtaaccagaggacacagaaagtatcttttggaaagtttagccacctgtgctttctgactcagagtgcatgcaacagttagatcatgcaacagttagattatgtttagggttaggattttcaaagaatggaggttgctgcactcagaaaataattcagatcatgtttatgcattattaagttgtactgaattctttgcagcttaatgtgatatatgactatcttgaacaagagaaaaaactaggagatgtttctcctgaagagcttttggggttgggaactattcttttttaattgctgtactacttaacattgttctaattcagtagcttgaggaacaggaacattgttttctagagcaagataataaaggagatgggccatacaaatgttttctactttcgttgtgacaacattgattaggtgttgtcagtactataaatgcttgagatataatgaatccacagcattcaaggtcaggtctactcaaagtctcacatggaaaagtgagttctgcctttcctttgatcgagggtcaaaatacaaagacatttttgctagggcctacaaattgaatttaaaaactcactgcactgattcatctgagctttttggttagtattcatggctagagtgaacatagctttagtttttgctgttgtaaaagtgttttcataagttcactcaagaaaaatgcagctgttctgaactggaatttttcagcattctttagaattttaaatgagtagagagctcaacttttattcctagcatctgcttttgactcatttctaggcagtgcttatgaagaaaaattaaagcacaaacattctggcattcaatcgttggcagattatcttctgatgacacagaatgaaagggcatctcagcctctctgaactttgtaaaaatctgtccccagttcttccatcggtgtagttgttgcatttgagtgaatactctcttgatttatgtattttatgtccagattcgccatttctgaaatccagatccaacacaagcagtcttgccgttagggcattttgaagcagatagtagagtaagaacttagtgactacagcttattcttctgtaacatatggtttcaaacatctttgccaaaagctaagcagtggtgaactgaaaagggcatattgccccaaggttacactgaagcagctcatagcaagttaaaatattgtgacagatttgaaatcatgtttgaatttcatagtaggaccagtacaagaatgtccctgctagtttctgtttgatgtttggttctggcggctcaggcattttgggaactgttgcacagggtgcagtcaaaacaacctacatataaaaattacataaaagaaccttgtccatttagctttcataagaaatcccatggcaaagagtaataaaaaggacctaatcttaaaaatacaatttctaagcacttgtaagaacccagtgggttggagcctcccactttgtccctcctttgaagtggatgggaactcaaggtgcaaagaacctgttttggaagaaagcttggggccatttcagccccctgtattctcatgattttctctcaggaagcacacactgtgaatggcagacttttcatttagccccaggtgacttactaaaaatagttgaaaattattcacctaagaatagaatctcagcattgtgttaaataaaaatgaaagctttagaaggcatgagatgttcctatcttaaataaagcatgtttcttttctatagagaaatgtatagtttgactctccagaatgtactatccatcttgatgagaaaactcttaaatagtaccaaacattttgaactttaaattatgtatttaaagtgagtgtttaagaaactgtagctgcttcttttacaagtggtgcctattaaagtcagtaatggccattattgttccattgtggaaattaaattatgtaagcttcctaatatcataaacatattaaaattcttctaaaatattgcttttcttttaagtgacaatttgactattcttatgataagcacatgagagtgtcttacattttccaaaagcaggctttaattgcatagttgagtctaggaaaaaataatgttaaaagtgaatatgccaccataattacttaattatgttagtatagaaactacagaatatttaccctggaaagaaaatattggaatgttattataaactcttagatatttatataattcaaaagaatgcatgtttcacattgtgacagataaagatgtatgatttctaaggctttaaaaattattcataaaacagtgggcaatagataaaggaaattctggagaaaatgaaggtatttaaagggtagtttcaaagctatatatattttgaaggatatattctttatgaacaaatatattgtaaaaatttatactaaggtcatctggtaactgtgggattaatatggtcgaaaacaaatgttatggagaagctgtcccaagcaaactaaattacctgtacttttttcccatttcaagggaagaggcaaccacatgaagcaatacttcttacacatgcctaagaacgttcattgaaaaaataaatttttaaaaggcatgtgtttcctatgccaccaatacttttgaaaaattgtgaaccttacccaaaaccatttatcatgtccattaagtatatttgggtatataattaggaagatatttacatgttccatctccacagtggaaaaacttattgaggctaccaaagtgtgccaagaaatgtaagtccttagagtaattagaaatgctgttttcctcaaaagcatgagaaactagcattttcatttcttatttactccctttctatatcaatgcaattcacaacccaattttaatacatccctatatctcaagcatttctatcttgtactttttcagaaaataaaccaaaaataatcctttggtctctctatcttctgacctttgtaagcaacagaaatgtaaaaacagaaggggtccaatttttacacgtttttttctcaagtagcctttctggggatttttattttcttaatgaagtgccaatcagcttttcaaaatgttttctatttctcagcatttccaggaagtgataacgtttagctaaatgagtagaagtggacttccttcaacatattgttaccttgtctagccttaggaagaaaacaagagccacctgaaaataaatacaggctcttttcgagcatctgctgaaatactgttacagcaatttgaagttgatgtggtaggaaaggaaggtgacttttcttgcaaaagtctttctaaacattcacactgtcctaagagatgagctttcttgttttattccggtatattccacaaggtggcacttttagagaaaaacaaatctgatgaagactaaagaggtacttctaaaagagatttcattctaactttatttttctgcgcatatttaactctttcctagcacttgttttttgggatgattaatagtctctataatgttctgtaacttcaatattttacttgttacctaggttctgaacaattgtctgcaaataaattgttcttaaggatggataatacacccattttgatcatttaagtaaagaaagcctagtcattcattcagtcaagaaaaaatttttgaagtacccagttaccttacttttctagattaaaacaggcttagttactaaaaaggcagtcctcatctgtgaacaggatagtttcgttagaagtataaaactcctttagtggccccagttaaaacacacataccctctctgctgctttcaaattccctagcatggtggcctttcaacattgattaaattttaaaatcctaatttaaagatcaggtgagcaaaatgagtagcacatcagtaattcagtagacaaaacttttgtctgaaaaattgctgtattgaaacagagccctaaaataccaaaagaccaggtaattttaacatttgtggaatcacaaatgtaaattcataagaagctctaattaaaaaaaaaaagtctgaagtatatgagcataacaacttaggagtgtgtctacatacttaacttttgaagttttttggcaactttatatactttttttaaatttacaagtctacttaaagacttcttataccccaaatgattaagttaattttagaggtcacctttctcacagcagtgtcacttgaaatttagtagggaaggatattgcagtatttttcagtttccttagcacagcaccacagaaagcagcttattccttttgagtggcagacactcgacggtgcctgcccaactttcctcctgagtggcaagcagatgagtctcagtaattcatactgaaccaaaatgccacatacactaggggcagtcagaaactggctgagaaatcccccgcctcattcgcccctctgctcccaggaactagagtccagttaaagcccctatgcgaaaggccgaattccaccccagggtttgttataacagtggccagtctgaaccccatttgctcgtgctcaaaacttgattcccacttgaaagccttccgggcgcgctgcctcgttgccccgcccctttggcaggagagaggcagtgggcgaggccgggctggggccccgcctcccactcacctgccggtgcctgaaattatgtgcggccccgcgggctgctttccgaggtcagagtgccctgctgctgtctcagaggcatctgttctgcaaatcttaggaagaaaaatgtccctagtagcaaacgggtgtcttctgtgcataaataagtacaacacaattctccgaaagttcgggtaaaaagagatgcggtagcagctgccctgtgtgaagctgtctaccccgcatctctcaggcgctaagctcagtttttgtttttgtttttgtttttttaaagaaaagatgtataattgcaggaatttttttttatttttttattttccatcattctatatatgtgatggtgaaagatatgcctggaaaagttttgttttgaaaagtttattttctgcttcgtcttcagttggcaaaagctctcaattctttagcttccagtttcttttctctctttttctttgttaggtaattaaaggtatgtaaacaaattatctcatgtagcaggggattttcatgttgagaggaatcttccgtgtgagttgtttggtcacacaaataaccctttctcaattttaggagtttggattgtcaaatgtaggtttttctcaaagggggcatataactacatattgactgccaagaactatgactgtagcactaatcagcacacatagagccacacaattatttaatttctaactctctgtggtccctagaaaaattccgttgatgtgcttaggttaaagttctgaagatacccgttgtacccttacttgaaagtttctaatcttaagttttatgaaatgcaataatatgtatcagctagcaatatttctgtgatcaccaacaactctcagtttgatcttaaagtctgaataataaaacaaatcccagcagtaatacatttcttaaacctcacagtgcatgatatatcttttcattctgatcctgtgtttgcaaaaatatacacatgtatatcatagttcctcactttttattcatttgttttcctattacctgtagtaaatatattagttagtacatggaatttatagcatcagctacccccaggaacagcacctgacaggcgggggattttttttcaagttgttctacatttgcataaattatttctattattattcatgtatgttatttatttctgaatcacactagtcctgtgaaagtacaactgaaggcagaaagtgttaggattttgcatctaatgttcattatcatggtattgatggacctaagaaaataaaaattagactaagcccccaaataagctgcatgcatttgtaacatgattagtagatttgaatatatagatgtagtattttgggtatctaggtgttttatcattatgtaaaggaattaaagtaaaggactttgtagttgtttttattaaatatgcatatagtagagtgcaaaaatatagcaaaaataaaaactaaaggtagaaaagcattttagatatgccttaatttagaaactgtgccaggtggccctcggaatagatgccaggcagagaccagtgcctgggtggtgcctcctcttgtctgccctcatgaagaagcttccctcacgtgatgtagtgccctcgtaggtgtcatgtggagtagtgggaacaggcagtactgttgagaggagagcagtgtgagagtttttctgtagaagcagaactgtcagcttgtgccttgaggcttccagaacgtgtcagatggagaagtccaagtttccatgcttcaggcaacttagctgtgtacagaagcaatccagtgtggtaataaaaagcaaggattgcctgtataatttattataaaataaaagggattttaacaaccaacaattcccaacacctcaaaagcttgttgcattttttggtatttgaggtttttatctgaaggttaaagggcaagtgtttggtatagaagagcagtatgtgttaagaaaagaaaaatattggttcacgtagagtgcaaattagaactagaaagttttatacgattatcattttgagatgtgttaaagtaggttttcactgtaaaatgtattagtgtttctgcattgccatagggcctggttaaaactttctcttaggtttcaggaagactgtcacatacagtaagcttttttccttctgacttataatagaaaatgttttgaaagtaaaaaaaaaaaatctaatttggaaatttgacttgttagtttctgtgtttgaaatcatggttctagaaatgtagaaattgtgtatatcagatactcatctaggctgtgtgaaccagcccaagatgaccaacatccccacacctctacatctctgtcccctgtatctcttcctttctaccactaaagtgttccctgctaccatcctggcttgtccacatggtgctctccatcttcctccacatcatggaccacaggtgtgcctgtctaggcctggccaccactcccaacttgacctagccacattcatctagagatggttcctgatgctgggcacagactgtgctcatggcacccattagaaatgcctctagcatctttgtatgcatcttgatttttaaaccaagtcattgtacagagcattcagttttggctgtggtaccaagagaaaaactaatcaagaatataaaccacattccaggctgctgttttctctccatctacaggccacacttttactgtatttcttcatacttgaaattcattctgctattttcatatcagggtacagacttataagggtgcatgttccttaaaggtgcataattattcttattccgtttgcttatattgctacagaatgctctgttttggtgctttgagttctgcagacccaagaagcagtgtggaaattcactgcctgggacacagtcttataagaatgttggcaggtgactttgtatcagatgttgcttctcttttctctgtacacagattgagagttaccacagtggcctgtcgggtccaccctgtgggtgcagcacagctctctgaaagcaagaaccttcctacctattctaacgtttttgccctctaagaaaaatggcctcaggtatggtatagacatagcaagaggggaagggctgtctcactctagcaaccatccctccattacacacagaaagccctcttgaagcaaaagaagaagaaagaaagaaagcttatctctaaggctactgtcttcagaatgctctgagctgaatgctcttgctcctttcccaagaggcagatgaaaatatagccagtttatctatacccttcctatctgaggaggagaatagaaaagtagggtaaatatgtaacgtaaaatatgtcattcaaggaccaccaaaactttaagtaccctatcattaaaaatctggttttaaaagtagctcaagtaagggatgctttgtgacccagggtttctgaagtcagatagccattcttacctgccccttactctgacttattgggaaagggagaactgcagtggtgtttctgttgcagtggcaaaggtaacatgtcagaaaattcagagggttgcataccaataatcctttggaaactggatgtcttactgggtgctagaatgaaaatgtaggtatttattgtcagatgatgaagttcattgtttttttcaaaattggtgttgaaatatcactgtccaatgtgttcacttatgtgaaagctaaattgaatgaggcaaaaagagcaaatagtttgtatatttgtaataccttttgtatttcttacaataaaaatattggtagcaaataaaaataataaaaacaataactttaaactgctttctggagatgaattactctcctggctattttcttttttactttaatgtaaaatgagtataactgtagtgagtaaaattcattaaattccaagttttagcagaaaaaaaaaaaaaaaaaaaa

SEQ ID NO: 27 - DNA, 2322 bp, Homo sapiens
atctcgagatagccgcagctctcgcgatctttctggagccgcacctccacgcggagtccgagcgcgtgtgctgagaccccagggtcgggagggcggagactgggagggagggagaagcccctttggcctgccttacggaagcctgcgagggagggtggtgtccactgcccagttccgtgtcccgatgcccagcgccagcgccagccgcaagagtcaggagaagccgcgggagatcatggacgcggcggaagattatgctaaagagagatatggaatatcttcaatgatacaatcacaagaaaaaccagatcgagttttggttcgggttagagacttgacaatacaaaaagctgatgaagttgtttgggtacgtgcaagagttcatacaagcagagctaaagggaaacagtgcttcttagtcctacgtcagcagcagtttaatgtccaggctcttgtggcggtgggagaccatgcaagcaagcagatggttaaatttgctgccaacatcaacaaagagagcattgtggatgtagaaggtgttgtgagaaaagtgaatcagaaaattggaagctgtacacagcaagacgttgagttacatgttcagaagatttatgtgatcagtttggctgaaccccgtctgcccctgcagctggatgatgctgttcggcctgaggcagaaggagaagaggaaggaagagctactgttaaccaggatacaagattagacaacagagtcattgatcttaggacatcaactagtcaggcagtcttccgtctccagtctggcatctgccatctcttccgagaaactttaattaacaaaggttttgtggaaatccaaactcctaaaattatttcagctgccagtgaaggaggagccaatgtttttactgtgtcatattttaaaaataatgcatacctggctcagtccccacagctatataagcaaatgtgcatttgtgctgattttgagaaggttttctctattggaccagtattcagagcggaagactctaatacccatagacatctaactgagtttgttggtttggacattgaaatggcttttaattaccattaccacgaagttatggaagaaattgctgacaccatggtacaaatattcaaaggacttcaagaaaggtttcagactgaaattcaaacagtgaataaacagttcccatgtgagccattcaaatttttggagccaactctaagactagaatattgtgaagcattggctatgcttagggaagctggagtcgaaatgggagatgaagacgatctgagcacaccaaatgaaaagctgttgggtcatttggtaaaggaaaagtatgatacagatttttatattcttgataaatatccattggctgtaagacctttctataccatgcctgacccaagaaatcccaaacagtccaactcttacgatatgttcatgagaggagaagaaatattgtcaggagctcaaagaatacatgatcctcaactgctaacagagagagctttacatcatggaattgatttggagaaaattaaggcttacattgattccttccgctttggagcccctcctcatgctggtggaggcattggattggaacgagttactatgctgtttctgggattgcataatgttcgtcagacctccatgttccctcgtgatcccaaacgactcactccttaaattcacactttgccacttaactccagtgtggatgacagagcgagaccctgcctcaaaaaaaaaaaaaaaaaaagaaagccacacttattcttttcagtaacctgctagtgcacaggctgtactttaggtacttaaaatatgcactagaataaatttgcaaggccctaaaatatcactgttatttttggagtaattcagtataggttcgtttaaaagagatttttataacttcagacatgcatcagtaggaaataacttgagaaattcatatggttatgttacaaattcatattctgttactacagtaaacgttaagagttttaaacagttaagattgtacaatttttcttcttttctatattacaagggccccagtgttaatgtcttagattttcagtatttgaacttatttttttaaattctgtcattgagataagaataattcaggtagcatctgaaattttaatgaatgtataattggcatatcatggaaaattaaccagaaagtatcagttcttaaaagttatgcctagaaattatgtaaagctaaactactggttagaaagtattcagtgtaatattgtattaatttgttaaattctaaacttgaatttcaataaaattttaaagct

SEQ ID NO: 28 - DNA, 4080 bp, Homo sapiens
gcgcctgcggcgccgcgggcgggtcgcctcccctcctgtagcccacacccttcttaaagcggcggcgggaagatgaggcttcgggagccgctcctgagcggcagcgccgcgatgccaggcgcgtccctacagcgggcctgccgcctgctcgtggccgtctgcgctctgcaccttggcgtcaccctcgtttactacctggctggccgcgacctgagccgcctgccccaactggtcggagtctccacaccgctgcagggcggctcgaacagtgccgccgccatcgggcagtcctccggggagctccggaccggaggggcccggccgccgcctcctctaggcgcctcctcccagccgcgcccgggtggcgactccagcccagtcgtggattctggccctggccccgctagcaacttgacctcggtcccagtgccccacaccaccgcactgtcgctgcccgcctgccctgaggagtccccgctgcttgtgggccccatgctgattgagtttaacatgcctgtggacctggagctcgtggcaaagcagaacccaaatgtgaagatgggcggccgctatgcccccagggactgcgtctctcctcacaaggtggccatcatcattccattccgcaaccggcaggagcacctcaagtactggctatattatttgcacccagtcctgcagcgccagcagctggactatggcatctatgttatcaaccaggcgggagacactatattcaatcgtgctaagctcctcaatgttggctttcaagaagccttgaaggactatgactacacctgctttgtgtttagtgacgtggacctcattccaatgaatgaccataatgcgtacaggtgtttttcacagccacggcacatttccgttgcaatggataagtttggattcagcctaccttatgttcagtattttggaggtgtctctgctctaagtaaacaacagtttctaaccatcaatggatttcctaataattattggggctggggaggagaagatgatgacatttttaacagattagtttttagaggcatgtctatatctcgcccaaatgctgtggtcgggaggtgtcgcatgatccgccactcaagagacaagaaaaatgaacccaatcctcagaggtttgaccgaattgcacacacaaaggagacaatgctctctgatggtttgaactcactcacctaccaggtgctggatgtacagagatacccattgtatacccaaatcacagtggacatcgggacaccgagctagcgttttggtacacggataagagacctgaaattagccagggacctctgctgtgtgtctctgccaatctgctgggctggtccctctcatttttaccagtctgagtgacagctccccttggctcatcattcagatggctttccagatgaccaggacaggtgggatattttgcccccaacttggctcggcatgtgaattcttagctctgcaaggtgtttatgcctttgcgggtttcttgatgtgttcgcagtgtcacccaagagtcagaactgtagacatcccaaaatttggtggccgtggaacacattcccggtgatagaattgctaaattgtcgtgaaataggttagaatttttctttaaattatggttttcttattcgcgaaaattcggagagtgctgctaaaattggattggtgtcatctttttggtagttgtaatttaacagaaaaacacaaaatttcaaccattcttaatgttacgtcctccccccacccccttctttcagtggtatgcaaccactgcaatcaatgtgtcatatgtcttttcttagcaaaaggatttaaaacttgagccctggaccttttgcctatgtgtgtggattccagggcaactctagcatcagagcaaaagccttgggtttctcgcattcagtggcctatctccagattgtctgatttctgaatgtaaagttgttgtgtttttttttaaatagtaggtttgtagtattttaaagaaagaacagatcgagttctaattatgatctagcttgattttgtgttgatccaaatttgcatagctgtttaatgttaagtcatgacaatttatttttcttggcatgctatgtaaacttgaatttcctaagtatttttattctggtgttttaaatatggggaggggtattgagcattttttagggagaaaaataaatatatgctgtagtggccacaaataggcctatgatttagctggcaggccaggttttctcaagagcaaaatcaccctctggccccttggcaggtaaggcctcccggtcagcattatcctgccagacctcggggaggatacctgggagacagaagcctctgcacctactgtgcagaactctccacttccccaaccctccccaggtgggcagggcggagggagcctcagcctccttagactgacccctcaggcccctaggctggggggttgtaaataacagcagtcaggttgtttaccagccctttgcacctccccaggcagagggagcctctgttctggtgggggccacctccctcagaggctctgctagccacactccgtggcccaccctttgttaccagttcttcctccttcctcttttcccctgcctttctcattccttccttcgtctccctttttgttcctttgcctcttgcctgtcccctaaaacttgactgtggcactcagggtcaaacagactatccattccccagcatgaatgtgccttttaattagtgatctagaaagaagttcagccgcacccacaccccaactccctcccaagaacttcggtcctaaagcctcctgttccacctcaggttttcacaggtgctcacaccacagttgaggctcacacacaggtctgtctgtcacaaacccacctctgttgggagctattgagccacctgggatgagatgacacaagacactcctaccactgagcgcctttgtccaggtgccagcctgggctcaggttccaagactcagctgcctaatcccagggttgagccttgtgctcgtgtcggaccccaaaccactgccctcctggtaccagccctcagtgtggaggctgagctggtgcctggccccagtcttatctgtgcctttactgctttgcgcatctcagatgctaacttggttctttttccagaaggctttgtattggttaaaaattattttctattgcagagagcagctgtgactcatgcaaaaagtattttctctgtcagatccccactctataccaaggatattattaaaactagaaatgactgcattgagagggagttgtgggaaataagaagaatgaaagcctctctttctgtccgcagatcctgacttttccaaagtgccttaaaagaaatcagacaaatgccctgagtggtaacttctgtgttattttactcttaaaaccaaactctaccttttcttgtttttttttttttttttttttttttttttggttaccttctcattcatgtcaagtatgtggttcattcttagaaccaagggaaatactgctccccccatttgctgacgtagtgctctcatgggctcacctgggcccaaggcacagccagggcacagttaggcctggatgtttgcctggtccgtgagatgccgcgggtcctgtttccttactggggatttcagggctgggggttcagggagcatttccttttcctgggagttatgtaccgcgaagtgtgtcatgtgccgtgcccttttctgtttctgtgtatcctattgctggtgactctgtgtgaactggcctttgggaaagatcagagaggcagaggtggcacaggacagtaaaggagatgctgtgctgcctacagcctggacagggtctctgctgtactgccaggggcgggggctctgcatagccaggatgacgcctttcatgtcccagagacctgttgtgctgtgtattttgatttcctgtgtatgcaaatgtgtgtatttaccattgtgtagggggctgtgtctgatcttggtgttcaaaacagaactgtatttttgcctttaaaattaaataatataacgtgaataaatgaccctaactttgt

SEQ ID NO: 29 - DNA, 1362 bp, Homo sapiens
atggcttcacccagcctcccgggcagtgactgctcccaaatcattgatcacagtcatgtccccgagtttgaggtggccacctggatcaaaatcacccttattctggtgtacctgatcatcttcgtgatgggccttctggggaacagcgccaccattcgggtcacccaggtgctgcagaagaaaggatacttgcagaaggaggtgacagaccacatggtgagtttggcttgctcggacatcttggtgttcctcatcggcatgcccatggagttctacagcatcatctggaatcccctgaccacgtccagctacaccctgtcctgcaagctgcacactttcctcttcgaggcctgcagctacgctacgctgctgcacgtgctgacactcagctttgagcgctacatcgccatctgtcaccccttcaggtacaaggctgtgtcgggaccttgccaggtgaagctgctgattggcttcgtctgggtcacctccgccctggtggcactgcccttgctgtttgccatgggtactgagtaccccctggtgaacgtgcccagccaccggggtctcacttgcaaccgctccagcacccgccaccacgagcagcccgagacctccaatatgtccatctgtaccaacctctccagccgctggaccgtgttccagtccagcatcttcggcgccttcgtggtctacctcgtggtcctgctctccgtagccttcatgtgctggaacatgatgcaggtgctcatgaaaagccagaagggctcgctggccgggggcacgcggcctccgcagctgaggaagtccgagagcgaagagagcaggaccgccaggaggcagaccatcatcttcctgaggctgattgttgtgacattggccgtatgctggatgcccaaccagattcggaggatcatggctgcggccaaacccaagcacgactggacgaggtcctacttccgggcgtacatgatcctcctccccttctcggagacgtttttctacctcagctcggtcatcaacccgctcctgtacacggtgtcctcgcagcagtttcggcgggtgttcgtgcaggtgctgtgctgccgcctgtcgctgcagcacgccaaccacgagaagcgcctgcgcgtacatgcgcactccaccaccgacagcgcccgctttgtgcagcgcccgttgctcttcgcgtcccggcgccagtcctctgcaaggagaactgagaagattttcttaagcacttttcagagcgaggccgagccccagtctaagtcccagtcattgagtctcgagtcactagagcccaactcaggcgcgaaaccagccaattctgctgcagagaatggttttcaggagcatgaagtttga

SEQ ID NO: 30 - DNA, 464 bp, Homo sapiens
ctccccagcctgataaaggtcctgcgggcaggacaggacctcccaaccaagccctccagcaaggattcagagtgcccctccggcctcgccatgaggctcttcctgtcgctcccggtcctggtggtggttctgtcgatcgtcttggaaggcccagccccagcccaggggaccccagacgtctccagtgccttggataagctgaaggagtttggaaacacactggaggacaaggctcgggaactcatcagccgcatcaaacagagtgaactttctgccaagatgcgggagtggttttcagagacatttcagaaagtgaaggagaaactcaagattgactcatgaggacctgaagggtgacatcccaggaggggcctctgaaatttcccacaccccagcgcctgtgctgaggactccctccatgtggccccaggtgccaccaataaaaatcctacagaaaattcaaa

SEQ ID NO: 31 - DNA, 2212 bp, Homo sapiens
cagcggcgcgtcctgcctgcagagagccaggccggagaagccgagcggcgcagaggacgccagggcgcgcgccgcagccacccaccctccggaccgcggcagctgctgacccgccatcgccatggcccgcgggaaagccaaggaggagggcagctggaagaaattcatctggaactcagagaagaaggagtttctgggcaggaccggtggcagttggtttaagatccttctattctacgtaatattttatggctgcctggctggcatcttcatcggaaccatccaagtgatgctgctcaccatcagtgaatttaagcccacatatcaggaccgagtggccccgccaggattaacacagattcctcagatccagaagactgaaatttcctttcgtcctaatgatcccaagagctatgaggcatatgtactgaacatagttaggttcctggaaaagtacaaagattcagcccagagggatgacatgatttttgaagattgtggcgatgtgcccagtgaaccgaaagaacgaggagactttaatcatgaacgaggagagcgaaaggtctgcagattcaagcttgaatggctgggaaattgctctggattaaatgatgaaacttatggctacaaagagggcaaaccgtgcattattataaagctcaaccgagttctaggcttcaaacctaagcctcccaagaatgagtccttggagacttacccagtgatgaagtataacccaaatgtccttcccgttcagtgcactggcaagcgagatgaagataaggataaagttggaaatgtggagtattttggactgggcaactcccctggttttcctctgcagtattatccgtactatggcaaactcctgcagcccaaatacctgcagcccctgctggccgtacagttcaccaatcttaccatggacactgaaattcgcatagagtgtaaggcgtacggtgagaacattgggtacagtgagaaagaccgttttcagggacgttttgatgtaaaaattgaagttaagagctgatcacaagcacaaatctttcccactagccatttaataagttaaaaaaagatacaaaaacaaaaacctactagtcttgaacaaactgtcatacgtatgggacctacacttaatctatatgctttacactagctttctgcatttaataggttagaatgtaaattaaagtgtagcaatagcaacaaaatatttattctactgtaaatgacaaaagaaaaagaaaaattgagccttgggacgtgcccatttttactgtaaattatgattccgtaactgacttgtagtaagcagtgtttctggcccctaagtattgctgccttgtgtattttatttagtgtacagtactacaggtgcatactctggtcatttttcaagccatgttttattgtatctgttttctactttatgtgagcaaggtttgctgtccaaggtgtaaatattcaacgggaataaaactggcatggtaattttttttttttttttttttttgttttttggctctttcaaaggtaatggcccatcgatgagcatttttaacatactccatagtcttttcctgtggtgttaggtctttatttttatttttttcctgggggctggggtgggggtttgtcatgggggaactgccctttaaattttaagtgacactacagaaaaacacaaaaaggtgatgggttgtgttatgcttgtattgaatgctgtcttgacatctcttgccttgtcctccggtatgttctaaagctgtgtctgagatctggatctgcccatcactttggctagtgacagggctaattaatttgctttatacattttcttttactttccttttttcctttctggaggcatcacatgctggtgctgtgtctttatgaatgttttaaccattttcatggtggaagaattttatatttatgcagttgtacaattttatttttttctgcaagaaaaagtgtaatgtatgaaataaaccaaagtcacttgtttgaaaataaatctttattttgaactttataaaaagcaatgcagtaccccatagactggtgttaaatgttgtctacagtgcaaaatccatgttctaacatatgtaataattgccaggagtacagtgctcttgttgatcttgtattcagtcaggttaaaacaacggacaataaaagaatgaacacattcaaaaaaaaaaaa

SEQ ID NO: 32 - DNA, 2168 bp, Homo sapiens
ctctctcgctcctgcgttcgcaggcggcggctggcggccggcttctcgctcgggcagcggcggcggcggcggcggcggcttccggagtcccgctgcgaagatgctcaaagtcacggtgccctcctgctccgcctcgtcctgctcttcggtcaccgccagtgcggccccggggaccgcgagcctcgtcccggattactggatcgacggctccaacagggatgcgctgagcgatttcttcgaggtggagtcggagctgggacggggtgctacatccattgtgtacagatgcaaacagaaggggacccagaagccttatgctctcaaagtgttaaagaaaacagtggacaaaaaaatcgtaagaactgagataggagttcttcttcgcctctcacatccaaacattataaaacttaaagagatatttgaaacccctacagaaatcagtctggtcctagaactcgtcacaggaggagaactgtttgataggattgtggaaaagggatattacagtgagcgagatgctgcagatgccgttaaacaaatcctggaggcagttgcttatctacatgaaaatgggattgtccatcgtgatctcaaaccagagaatcttctttatgcaactccagccccagatgcaccactcaaaatcgctgattttggactctctaaaattgtggaacatcaagtgctcatgaagacagtatgtggaaccccagggtactgcgcacctgaaattcttagaggttgtgcctatggacctgaggtggacatgtggtctgtaggaataatcacctacatcttactttgtggatttgaaccattctatgatgaaagaggcgatcagttcatgttcaggagaattctgaattgtgaatattactttatctccccctggtgggatgaagtatctctaaatgccaaggacttggtcagaaaattaattgttttggatccaaagaaacggctgactacatttcaagctctccagcatccgtgggtcacaggtaaagcagccaattttgtacacatggataccgctcaaaagaagctccaagaattcaatgcccggcgtaagcttaaggcagcggtgaaggctgtggtggcctcttcgcgcctgggaagtgccagcagcagccatggcagcatccaggagagccacaaggctagccgagacccttctccaatccaagatggcaacgaggacatgaaagctattccagaaggagagaaaattcaaggcgatggggcccaagccgcagttaagggggcacaggctgagctgatgaaggtgcaagccttagagaaagttaaaggtgcagatataaatgctgaagaggcccccaaaatggtgcccaaggcagtggaggatgggataaaggtggctgacctggaactagaggagggcctagcagaggagaagctgaagactgtggaggaggcagcagctcccagagaagggcaaggaagctctgctgtgggttttgaagttccacagcaagatgtgatcctgccagagtactaaacagcttccttcagatctggaagccaaacaccggcattttatgtactttgtccttcagcaagaaaggtgtggaagcatgatatgtactatagtgattctgtttttgaggtgcaaaaaacatacatatataccagttggtaattctaacttcaatgcatgtgactgctttatgaaaataatagtgtcttctatggcatgtaatggatacctaataccgatgagttaaatcttgcaagttaacacaacgtaacacttaaaagcatacattttcagcaaccagtggcacatatttgaagtgaatagtagcaaattgtttttgctttgaaaatctagccatcctacatcctttggatttcttcacaaggcagtaattcctttgaactactgcttagctaatactaggtagtgctaaaagacatgttcccataacttttacaacattttactttttatcattgatgtgttcaaactgtttacaaggagatgcttatagatgatagttgtacatatgtgcaaaaaaaaatccacttgcaatggtaagaaattgaagtatccttaaaggccatgaagccatatgtccctaaaaaaaaaaaaaaaaaaaaaaaaaaaaaaaaaaaaaaaaaaaaaaaaaaaaaaaaaaaaaaaa

SEQ ID NO: 33 - DNA, 1245 bp, Homo sapiens
cgggcgtgtaacccacgggtgcgcgcccacgaccgccagactcgagcagtctctggaacacgctgcggggctcccgggcctgagccaggtctgttctccacgcaggtgttccgcgcgccccgttcagccatgtcgtccggcatccatgtagcgctggtgactggaggcaacaagggcatcggcttggccatcgtgcgcgacctgtgccggctgttctcgggggacgtggtgctcacggcgcgggacgtgacgcggggccaggcggccgtacagcagctgcaggcggagggcctgagcccgcgcttccaccagctggacatcgacgatctgcagagcatccgcgccctgcgcgacttcctgcgcaaggagtacgggggcctggacgtgctggtcaacaacgcgggcatcgccttcaaggttgctgatcccacaccctttcatattcaagctgaagtgacgatgaaaacaaatttctttggtacccgagatgtgtgcacagaattactccctctaataaaaccccaagggagagtggtgaacgtatctagcatcatgagcgtcagagcccttaaaagctgcagcccagagctgcagcagaagttccgcagtgagaccatcactgaggaggagctggtggggctcatgaacaagtttgtggaggatacaaagaagggagtgcaccagaaggagggctggcccagcagcgcatacggggtgacgaagattggcgtcaccgttctgtccaggatccacgccaggaaactgagtgagcagaggaaaggggacaagatcctcctgaatgcctgctgcccagggtgggtgagaactgacatggcgggacccaaggccaccaagagcccagaagaaggtgcagagacccctgtgtacttggcccttttgcccccagatgctgagggtccccatggacaatttgtttcagagaagagagttgaacagtggtgagctgggctcacagctccatccatgggccccattttgtaccttgtcctgagttggtccaaagggcatttacaatgtcataaatatccttatataagaaaaaaaatgatctcttatcaattagcactcactaatgtactactaattgagcaacctacgcactcagttgactacgtaaatctgtcaggtcttttgtgatttcctctgatgcaggagaggaaaaattgtaattgatgaaaataatgaatgaaaatcaacagatgaataaatggttctttataagtg

SEQ ID NO: 34 - DNA, 6480 bp, Homo sapiens
agagcgagcaggggagagcgagaccagttttaaggggaggaccggtgcgagtgaggcagccccgaggctctgctcgcccaccacccaatcctcgcctcccttctgctccaccttctctctctgccctcacctctcccccgaaaaccccctatttagccaaaggaaggaggtcaggggaacgctctcccctccccttccaaaaaacaaaaacagaaaaacccttttccaggccggggaaagcaggagggagaggggccgccgggctggccatggagctgctgtgccacgaggtggacccggtccgcagggccgtgcgggaccgcaacctgctccgagacgaccgcgtcctgcagaacctgctcaccatcgaggagcgctaccttccgcagtgctcctacttcaagtgcgtgcagaaggacatccaaccctacatgcgcagaatggtggccacctggatgctggaggtctgtgaggaacagaagtgcgaagaagaggtcttccctctggccatgaattacctggaccgtttcttggctggggtcccgactccgaagtcccatctgcaactcctgggtgctgtctgcatgttcctggcctccaaactcaaagagaccagcccgctgaccgcggagaagctgtgcatttacaccgacaactccatcaagcctcaggagctgctggagtgggaactggtggtgctggggaagttgaagtggaacctggcagctgtcactcctcatgacttcattgagcacatcttgcgcaagctgccccagcagcgggagaagctgtctctgatccgcaagcatgctcagaccttcattgctctgtgtgccaccgactttaagtttgccatgtacccaccgtcgatgatcgcaactggaagtgtgggagcagccatctgtgggctccagcaggatgaggaagtgagctcgctcacttgtgatgccctgactgagctgctggctaagatcaccaacacagacgtggattgtctcaaagcttgccaggagcagattgaggcggtgctcctcaatagcctgcagcagtaccgtcaggaccaacgtgacggatccaagtcggaggatgaactggaccaagccagcacccctacagacgtgcgggatatcgacctgtgaggatgccagttgggccgaaagagagagacgcgtccataatctggtctcttcttctttctggttgtttttgttctttgtgttttagggtgaaacttaaaaaaaaaattctgcccccacctagatcatatttaaagatcttttagaagtgagagaaaaaggtcctacgaaaacggaataataaaaagcatttggtgcctatttgaagtacagcataagggaatcccttgtatatgcgaacagttattgtttgattatgtaaaagtaatagtaaaatgcttacaggaaaacctgcagagtagttagagaatatgtatgcctgcaatatgggaacaaattagaggagacttttttttttcatgttatgagctagcacatacacccccttgtagtataatttcaaggaactgtgtacgccatttatggcatgattagattgcaaagcaatgaactcaagaaggaattgaaataaggagggacatgatggggaaggagtacaaaacaatctctcaacatgattgaaccatttgggatggagaagcacctttgctctcagccacctgttactaagtcaggagtgtagttggatctctacattaatgtcctcttgctgtctacagtagctgctacctaaaaaaagatgttttattttgccagttggacacaggtgattggctcctgggtttcatgttctgtgacatcctgcttcttcttccaaatgcagttcattgcagacaccaccatattgctatctaatggggaaatgtagctatgggccataaccaaaactcacatgaaacggaggcagatggagaccaagggtgggatccagaatggagtcttttctgttattgtatttaaaagggtaatgtggccttggcatttcttcttagaaaaaaactaatttttggtgctgattggcatgtctggttcacagtttagcattgttataaaccattccattcgaaaagcactttgaaaaattgttcccgagcgatagatgggatggtttatgcaagtcatgctgaatactcctcccctcttctcttttgccccctcccttcctgcccccagtctgggttactcttcgcttctggtatctggcgttctttggtacacagttctggtgttcctaccaggactcaagagacaccccttcctgctgacattcccatcacaacattcctcagacaagcctgtaaactaaaatctgttaccattctgatggcacagaaggatcttaattcccatctctatacttctcctttggacatggaaagaaaagttattgctggtgcaaagatagatggctgaacatcagggtgtggcattttgttcccttttccgttttttttttttttattgttgttgttaattttattgcaaagttgtattcagcgtacttgaatttttcttcctctccacttcttagaggcattcagttagcaaagaggttggagcaacaacttttttttttttttttgcacaattgtaattgacaggtaatgaagctatttgttaaaatatttgcctttttaagtaaaaaagaaaaatcagaacagggctatttgaagaattattttatacacagattctgccttgtttcatagtatgagggttgaagacggaaaacaatctaagggtctctcatttttttaattttgttttgttcagtttggtttttttttttttttgcgctgctaagaagctaaagtcatccatccttattcacgttgacagtacctagctgtaatgtttcacagagtgtgctgctattttataaacatttttataatatattattttactgcttaaattccaagtcctgaagtagatggttgagatatgagttcttcgtactggaaaagcccttccgtagtttgttttcttctggtagcatattcatggttgtttttttttttcttttttggttttttggttttttttttttcctctgatcacattcttcaaagacggagtattctttacctcaggtttactggacaaaatcaataactacaaaaggcaatgattcacgcttttgttttcataatacctcacaaccgtacagtttctgcttgggagcccattcgcatgaggaatacagaagcagtgtgagcagggctgactccctctcaggtggaaggcagggcggtctcactcccagggacctttttggtcatggaggccatcgggctcccagttagaccctggtatcctcatcatgatggaaaaaatacattgaaccaagggatcctccctccccttcaaggcagacgttcagtacaaacatttatgcggtaggctcagatgtcgtaatttgcacttaggtaccaggtgtcaggaaacagactaaaaagaattccaccaggctgtttggagatcctcatcttggagctttttcaaaagcggggcttcatctgcaaagggccctttcatcttgaagtttttcccctccgtctttcccctcccctggcatggacaccttgtgtttaggatcatctctgcaggtttcctaggtctgaatctgcgagtagatgaacctgcagcaagcagcgtttatggtgcttccttctccctcctctgtctcaaactgcgcaggcaagcactatgcaagcccaggccctctgctgagcggtactaaacggtcgggttttcaatcacactgaattggcaggataagaaaaataggtcagataagtatgggatgatagttgaagggaggtgaagaggctgcttctctacagaggtgaaattccagatgagtcagtctcttgggaagtgtgtttagaagggttcaggactttgtgagttagcatgaccctaaaattctaggggatttctggtgggacaatgggtggtgaattttgaagttttggagagggaagtggagcagccagcaagtaagctagccagagttttctcaagagccagctttgctcagcacactctcctgggccccaaggagtcccacggaatggggaaagtgggaaccctggagttcttgggaatcttggagcctaaagagaaaccgaggtgcaaattcatttcatggtgactgacccttgagcttaaacagaagcagcaaatgaaagaaccggacaaataaggaagggcacaagcctacccgactctatttacagtctgtaactttccactcttcctgtagtcccgaggcccctgggtccttctagcttttctctttcccatccttggggccttgtgtgatgatgggtgtggggctgccgatgggaaagtcgggggttgttaggcttttctgcctgctcctgcttaaacacaagaaggaatcctggattttgccctctccttagctcttagtctctttggtaggagttttgttccagaggagctctcccccttggatttgaacttgctctttttgttgttgttgttctttctcttctttttcttacctcccactaaaggggttccaaattatcctggtctttttctaccttgttgtgtttctatctcgtctttacttccatctgtttgtttttttctccatcagtgggggccgagttgttcccccagcctgccaaattttgatccttcccctcttttggccaaatcctagggggaagaaatcctagtatgccaaaaatatatgctaagcataattaaactccatgcgggtccataacagccaagaagcctgcaggagaaagccaagggcagttccctccgcagaacaccccatgcgtgctgagaggcgagctccttgaagaaggggctgttcttccaggaggccttattttgaactgcctcaggaccccactggagagcacagcatgccttactactgggtcatccttggtctatgtgctctgtactggaggctctgttctgcctcttatcagccaggtcaggggcacacatggcttaagtgacaaagccagaggagaagacaaccctgacagcatcacgctgcatcccattgctagcaggattggcaactcttcagacggagctgcgcttccctgcagtctagcacctctagggcctctccagactgtgccctgggagctctgggactgaaaggttaagaacataaggcaggatcagatgactctctccaagagggcaggggaattttctctccatgggccacaggggacagggctgggagaagaaatagacttgcaccttatgtcatgtaaataattgattttctagttcaagaagataatattggtagtgtgggaattggaggtaggaaggggaggaagtctgagtaagccagttggcttctaagccaaaaggattcctctttgtttatctctgagacagtccaaccttgagaatagctttaaaagggaaattaatgctgagatgataaagtccccttaagccaacaaaccctctgtagctatagaatgagtgcaggtttctattggtgtggactcagagcaatttacaagagctgttcatgcagccatccatttgtgcaaaatagggtaagaagattcaagaggatatttattacttcctcataccacatggcttttgatgattctggattctaaacaacccagaatggtcatttcaggcacaacgatactacattcgtgtgtgtctgcttttaaacttggctgggctatcagaccctattctcggctcaggttttgagaagccatcagcaaatgtgtacgtgcatgctgtagctgcagcctgcatcccttcgcctgcagcctactttggggaaataaagtgccttactgactgtagccattacagtatccaatgtcttttgacaggtgcctgtccttgaaaaacaaagtttctatttttatttttaattggtttagttcttaactgctggccaactcttacatccccagcaaatcatcgggccattggattttttccattatgttcatcacccttatatcatgtacctcagatctctctctctctcctctctctcagttatatagtttcttgtcttggactttttttttcttttctttttctttttttttttgctttaaaacaagtgtgatgccatatcaagtccatgttattctctcacagtgtactctataagaggtgtgggtgtctgtttggtcaggatgttagaaagtgctgataagtagcatgatcagtgtatgcgaaaaggtttttaggaagtatggcaaaaatgttgtattggctatgatggtgacatgatatagtcagctgccttttaagaggtcttatctgttcagtgttaagtgatttaaaaaaataataacctgttttctgactagtttaaagatggatttgaaaatggttttgaatgcaattaggttatgctatttggacaataaactcaccttgacct

SEQ ID NO: 35 - DNA, 2859 bp, Homo sapiens
ctttccgcggcattctttgggcgtgagtcatgcaggtttgcagccagccccaaagggggtgtgtgcgcgagcagagcgctataaatacggcgcctcccagtgcccacaacgcggcgtcgccaggaggagcgcgcgggcacagggtgccgctgaccgaggcgtgcaaagactccagaattggaggcatgatgaagactctgctgctgtttgtggggctgctgctgacctgggagagtgggcaggtcctgggggaccagacggtctcagacaatgagctccaggaaatgtccaatcagggaagtaagtacgtcaataaggaaattcaaaatgctgtcaacggggtgaaacagataaagactctcatagaaaaaacaaacgaagagcgcaagacactgctcagcaacctagaagaagccaagaagaagaaagaggatgccctaaatgagaccagggaatcagagacaaagctgaaggagctcccaggagtgtgcaatgagaccatgatggccctctgggaagagtgtaagccctgcctgaaacagacctgcatgaagttctacgcacgcgtctgcagaagtggctcaggcctggttggccgccagcttgaggagttcctgaaccagagctcgcccttctacttctggatgaatggtgaccgcatcgactccctgctggagaacgaccggcagcagacgcacatgctggatgtcatgcaggaccacttcagccgcgcgtccagcatcatagacgagctcttccaggacaggttcttcacccgggagccccaggatacctaccactacctgcccttcagcctgccccaccggaggcctcacttcttctttcccaagtcccgcatcgtccgcagcttgatgcccttctctccgtacgagcccctgaacttccacgccatgttccagcccttccttgagatgatacacgaggctcagcaggccatggacatccacttccatagcccggccttccagcacccgccaacagaattcatacgagaaggcgacgatgaccggactgtgtgccgggagatccgccacaactccacgggctgcctgcggatgaaggaccagtgtgacaagtgccgggagatcttgtctgtggactgttccaccaacaacccctcccaggctaagctgcggcgggagctcgacgaatccctccaggtcgctgagaggttgaccaggaaatacaacgagctgctaaagtcctaccagtggaagatgctcaacacctcctccttgctggagcagctgaacgagcagtttaactgggtgtcccggctggcaaacctcacgcaaggcgaagaccagtactatctgcgggtcaccacggtggcttcccacacttctgactcggacgttccttccggtgtcactgaggtggtcgtgaagctctttgactctgatcccatcactgtgacggtccctgtagaagtctccaggaagaaccctaaatttatggagaccgtggcggagaaagcgctgcaggaataccgcaaaaagcaccgggaggagtgagatgtggatgttgcttttgcacctacgggggcatctgagtccagctccccccaagatgagctgcagccccccagagagagctctgcacgtcaccaagtaaccaggccccagcctccaggcccccaactccgcccagcctctccccgctctggatcctgcactctaacactcgactctgctgctcatgggaagaacagaattgctcctgcatgcaactaattcaataaaactgtcttgtgagctgatcgcttggagggtcctctttttatgttgagttgctgcttcccggcatgccttcattttgctatggggggcaggcaggggggatggaaaataagtagaaacaaaaaagcagtggctaagatggtatagggactgtcataccagtgaagaataaaagggtgaagaataaaagggatatgatgacaaggttgatccacttcaagaattgcttgctttcaggaagagagatgtgtttcaacaagccaactaaaatatattgctgcaaatggaagcttttctgttctattataaaactgtcgatgtattctgaccaaggtgcgacaatctcctaaaggaatacactgaaagttaaggagaagaatcagtaagtgtaaggtgtacttggtattataatgcataattgatgttttcgttatgaaaacatttggtgcccagaagtccaaattatcagttttatttgtaagagctattgcttttgcagcggttttatttgtaaaagctgttgatttcgagttgtaagagctcagcatcccaggggcatcttcttgactgtggcatttcctgtccaccgccggtttatatgatcttcatacctttccctggaccacaggcgtttctcggcttttagtctgaaccatagctgggctgcagtaccctacgctgccagcaggtggccatgactacccgtggtaccaatctcagtcttaaagctcaggcttttcgttcattaacattctctgatagaattctggtcatcagatgtactgcaatggaacaaaactcatctggctgcatcccaggtgtgtagcaaagtccacatgtaaatttatagcttagaatattcttaagtcactgtcccttgtctctctttgaagttataaacaacaaacttaaagcttagcttatgtccaaggtaagtattttagcatggctgtcaaggaaattcagagtaaagtcagtgtgattcacttaatgatatacattaattagaattatggggtcagaggtatttgcttaagtgatcataattgtaaagtatatgtcacattgtcacattaatgtcaaaaaaaaaaaaaaaaaa

SEQ ID NO: 36 - DNA, 3829 bp, Homo sapiens
tcccactcggctcctcttacggagtcctcattccaccccccttgtttccgcattcatcctgagtggctggtgggaacgtgaaaagggagaggaaaaggcgcaagaagccagagagaggggtgtgggaaaagcgaaaacaggctgccaaatcaggggattccttccaatttaaaaaggaagtctgctgacgttagttagttaaatttaacatctttttatgtgtaacacttgactttggaagcaaaaatgaactttgcggagagagagggctctaagagatactgcattcaaacgaaacatgtggccattctctgtgcggtggtggtgggtgtaggattaatagtgggacttgccgtgggcttgaccagatcgtgtgactccagcggggacggcgggccgggcactgcgccagctccttcccacctgccttcttccacggccagcccctcaggtcctcctgcccaggaccaggacatctgcccggccagtgaggatgagagcggacagtggaaaaactttcgactgccggacttcgtcaacccagtccactacgacctgcacgtgaagcccctgttggaggaggacacctacacgggcaccgtgagcatctccatcaacctgagcgctcccacccggtacctgtggctgcacctccgggagaccaggatcacccggctcccggagctgaagaggccctctggggaccaggtgcaagtccggaggtgtttcgagtacaaaaagcaggagtacgtggtggtcgaggcggaggaagagcttacccccagcagtggagatggcctgtatctcctgaccatggagttcgccggctggctgaacggctccctcgtgggattttatagaaccacctacacggagaacggacgagtcaagagcatagtggccaccgatcatgaaccaacagatgccaggaaatcttttccttgttttgatgagcccaacaaaaaggcaacttatacaatatctatcacccatcccaaagaatacggagcactttcaaatatgccagtggcgaaagaagagtcagtggatgataaatggactcgaacaacttttgagaagtctgtccccatgagcacgtacctggtgtgctttgctgtacatcaatttgactctgtaaagagaatatcaaatagtggaaaacctcttacaatttatgtccagccagagcaaaagcacacagccgaatatgctgcaaacataactaaaagtgtgtttgattattttgaagaatactttgctatgaattattctcttcctaaattagataaaatcgctattccagattttggcactggtgccatggagaactggggactcatcacgtacagagaaacgaacctgctttatgaccctaaggaatcagcctcatcaaaccaacagagggtggccactgtggttgcccatgaacttgtgcatcagtggtttggaaatattgtgaccatggactggtgggaagacttgtggctaaatgaaggatttgcttctttctttgagtttctgggagtaaaccatgcagaaacagactggcaaatgcgtgaccaaatgttacttgaagatgtattacctgttcaagaggatgattctttgatgtcttcgcatccaattattgtgactgtgacaacccctgatgaaataacatctgtttttgatggaatatcctatagcaagggatcttctattttgagaatgcttgaagactggataaaaccagagaattttcaaaaaggatgtcagatgtacttggaaaaataccaattcaagaatgcaaaaacttctgatttttgggcagcactggaagaggcaagtaggctaccagtgaaagaagtaatggacacctggaccagacagatgggttatcctgtgcttaacgtgaacggtgtcaagaacatcacacagaaacgctttttgttggacccaagagctaacccttctcagcccccttcagatcttggttatacatggaatatcccagttaaatggactgaagataatataacaagcagtgtgttatttaataggtcagaaaaagaaggaatcactttgaactcctctaatcctagtggaaatgcttttctcaaaataaacccagatcatattgggttttatcgtgtaaattatgaagtagcaacttgggactcgatagctacagcgctctccttgaaccacaagacattttcttcagcagatcgtgcaagtcttattgatgatgcttttgccttggcaagagctcaacttctagattataaggtggctttgaacttgaccaagtatctcaaaagggaagagaattttttaccatggcagagagtaatttcagctgtaacctacatcattagcatgtttgaagatgataaagagctatatcctatgattgaggaatacttccaaggtcaagtgaagcctattgcagattctctgggatggaatgatgctggagaccatgtcacaaagttactccgttcctccgtgttagggtttgcgtgcaagatgggagacagagaagccttgaacaatgcttcctcgttatttgagcagtggctaaatgggactgtaagccttcccgtaaatctcaggcttctggtgtatcggtatgggatgcagaactctggcaatgagatttcatggaactacactcttgagcaataccagaaaacttcattagctcaagaaaaagaaaaactgctgtatggattagcatcagtgaagaacgttactcttttgtcaaggtatttggatttgctcaaggacacgaaccttattaaaactcaggatgtgtttacagtcattcgatatatctcatataacagctatgggaagaacatggcctggaattggatacaactcaactgggactatctagtcaacagatatacactcaataacagaaaccttggccgaattgtcacaatagcagagccattcaacactgaactgcaactgtggcagatggagagcttttttgcaaaatatccacaagctggagcaggagaaaaacctagggaacaagtgctggaaacagtgaaaaacaatatagagtggctaaaacaacatagaaacaccatcagagaatggttttttaatttacttgagagtggttaatgtattcaaatgttagagtttaattttgtgaatctattgtttctcctctgaagcatttggtggcctaatttacaagcacgatggagagagccttataaacagataatgcttttactaagcactgtgtttatatgtcttgcaaagcctttaaattgttcctctttgtttatgaagaaagatactaatagagtacttaatatactcagggattccttctaagtgtacttcataagatattctttacaaactgaagataatgaaatagttattttaatacctttaaatatcattctttgtatcttaaatctgtgaagtagaacaatttggtcttagctttacattttcagtaccaaagaaacaccacttaatcttctctcttgattgatttttaaagtttaaataccagtacttgagggaccaatattaccatcttaatctttattttattattcagaattatacagacctaatatcattttattcacatatgtcttactactttaaatcctaccaaagtaacctgggcttaagttttacttgaggatcatatgaattagccaaaagaatggctgactgttgcctttactcttataaaatcaataagagaactctcctctttttttaaaaataaatctaaatgattatcttgaaaaagtattgttttccagtgtcacttgactcttgaataaaaataactgcagtgttcccc

SEQ ID NO: 37 - DNA, 1095 bp, Homo sapiens
tccccgctctgctctgtccggtcacaggactttttgccctctgttcccgggtccctcaggcggccacccagtgggcacactcccaggcggcgctccggccccgcgctccctccctctgcctttcattcccagctgtcaacatcctggaagctttgaagctcaggaaagaagagaaatccactgagaacagtctgtaaaggtccgtagtgctatctacatccagacggtggaagggagagaaagagaaagaaggtatcctaggaatacctgcctgcttagaccctctataaaagctctgtgcatcctgccactgaggactccgaagaggtagcagtcttctgaaagacttcaactgtgaggacatgtcgttcagatttggccaacatctcatcaagccctctgtagtgtttctcaaaacagaactgtccttcgctcttgtgaataggaaacctgtggtaccaggacatgtccttgtgtgcccgctgcggccagtggagcgcttccatgacctgcgtcctgatgaagtggccgatttgtttcagacgacccagagagtcgggacagtggtggaaaaacatttccatgggacctctctcaccttttccatgcaggatggccccgaagccggacagactgtgaagcacgttcacgtccatgttcttcccaggaaggctggagactttcacaggaatgacagcatctatgaggagctccagaaacatgacaaggaggactttcctgcctcttggagatcagaggaggaaatggcagcagaagccgcagctctgcgggtctactttcagtgacacagatgtttttcagatcctgaattccagcaaaagagctattgccaaccagtttgaagaccgcccccccgcctctccccaagaggaactgaatcagcatgaaaatgcagtttcttcatctcaccatcctgtattcttcaaccagtgatcccccacctcggtcactccaactcccttaaaatacctagacctaaacggctcagacaggcagatttgaggtttccccctgtctccttattcggcagccttatgattaaacttccttctctgctgcaaaaaaaaaaaaaaa

SEQ ID NO: 38 - DNA, 2251 bp, Homo sapiens
gccgcgtgcagaggtgctcaagcctcctcgcggtccgcagtcagtgccgccgcgcccggcctcccgcacgccccgcaggtagcgcccccgcccgcggcccagagtgcgctcgcgccggcaccagctcccggataaacggcgcgccgcgcggagatgacagccgaggagatgaaggcgaccgagagcggggcgcagtcggcgccgctgcccatggagggagtggacatcagccccaaacaggacgaaggcgtgctgaaggtcatcaagagagagggcacaggtacagagatgcccatgattggggaccgagtctttgtccactacactggctggctattagatggcacaaagtttgactccagtctggatcgcaaggacaaattctcctttgacctgggaaaaggggaggtcatcaaggcttgggacattgccatagccaccatgaaggtgggggaggtgtgccacatcacctgcaaaccagaatatgcctacggttcagcaggcagtcctccaaagattccccccaatgccacgcttgtatttgaggtggagttgtttgagtttaagggagaagatctgacggaagaggaagatggcggaatcattcgcagaatacagactcgcggtgaaggctatgctaagcccaatgagggtgctatcgtggaggttgcactggaagggtactacaaggacaagctctttgaccagcgggagctccgctttgagattggcgagggggagaacctggatctgccttatggtctggagagggccattcagcgcatggagaaaggagaacattccatcgtgtacctcaagcccagctatgcttttggcagtgttgggaaggaaaagttccaaatcccaccaaatgctgagctgaaatatgaattacacctcaagagttttgaaaaggccaaggagtcttgggagatgaattcagaagagaagctggaacagagcaccatagtgaaagagcggggcactgtgtacttcaaggaaggtaaatacaagcaagctttactacagtataagaagatcgtgtcttggctggaatatgagtctagtttttccaatgaggaagcacagaaagcacaggcccttcgactggcctctcacctcaacctggccatgtgtcatctgaaactacaggccttctctgctgccattgaaagctgtaacaaggccctagaactggacagcaacaacgagaagggcctcttccgccggggagaggcccacctggccgtgaatgactttgaactggcacgggctgatttccagaaggtcctgcagctctaccccaacaacaaagccgccaagacccagctggctgtgtgccagcagcggatccgaaggcagcttgcccgggagaagaagctctatgccaatatgtttgagaggctggctgaggaggagaacaaggccaaggcagaggcttcctcaggagaccatcccactgacacagagatgaaggaggagcagaagagcaacacggcagggagccagtctcaggtggagacagaagcatagcccctctccaccagccctactcctgcggctgcctgccccccagtctccccactccaccctgttagttttgtaaaaactgaagaattttgagtgaattagacctttatttttctatctggttggatggtggctttaggggaagggggaaaggtgtaggctgggggattgaggtggggaatcattttagctggtgtcagcccctcttcccttcctccattgcacatgaacatatgtccatccatatatattcatcagaatgttaatttattttgctccctctgttaggtccattttctaagggtagaagaggcaagtggtagggatgaggtctgataagaacccagggtggagagggagactcctgggcagccgttttcctcatcctttccctctcccagtccatttccaaatgtggcctccatgtgggtgctagggacatgggaaaaaccactgctatgccatttcttctctctgttcccttcctcacccccgacggtgtggctgatgatgtcttctggtgtcatggtgaccaccccctgttccctgttctggtatttcccctgtcagtttcccctctcggccaggttgtgtcccaaaatcccctcagcctcttctctgcacgttgctgaaggtccaggcttgcctcaagttccatgcttgagcaataaagtggaaacaataaaacctgggtgtcagacaaaaaaaaaaaaaaaaaaaa

SEQ ID NO: 39 - DNA, 2148 bp, Homo sapiens
aagacaaacactttccttgactttgagaaataatttaagtcaaagaatctgctctatgctaaccaagagatagagcacagcaaagatctgccagccccaggcctctacctagtggcctggaaattcaagtattcttattggtggaggccatttgtttctgattagaagctgtctaaacctcctactcctcaactcaaaggaaaacacagagcataccatggccaagaaagttgcagtgattggagctggtgtgagtggcctctcctccatcaaatgctgtgtggatgaggacctggagcccacctgctttgagagaagtgatgacattgggggattatggaagtttactgaatcttccaaagatgggatgaccagggtctataagtcattagtgacaaatgtctgtaaggaaatgtcatgttacagtgacttccctttccacgaagattatcctaatttcatgaaccatgaaaaattttgggactatctccaagaatttgctgagcactttgacctcctgaaatacattcagtttaagaccactgtgtgcagcataacgaagcgtccagacttctccgaaactggtcagtgggatgttgtcacagagacagagggcaagcaaaatagagctgtctttgatgctgttatggtttgcactggacatttcctgaatccccatttacctttggaagcctttcctggaattcataagtttaaaggtcagatcctgcatagtcaagagtacaagatcccagaaggctttcagggcaaacgcgtcttggtgattggtcttgggaacactggaggagacattgctgtggaactcagtcgaacggcagctcaggtacttctcagtactagaactggtacctgggttcttgggcgctcttcagattggggctatccttataatatgatggttacaagaagatgctgtagttttattgcacaagttctgccttcacgttttctaaactggattcaagaaaggaagttgaataagagatttaatcatgaggattatggattaagtattaccaaagggaaaaaagcaaaattcattgtgaatgatgagctgccaaactgtatcctctgtggggcaatcactatgaaaaccagcgtgattgaatttacagaaacctctgctgtctttgaagatgggacagtggaagaaaacattgatgttgtgatcttcactacaggatatacattttcttttccattttttgaagaacctcttaaaagcctctgtacaaagaagatatttctatacaagcaagtctttcccttaaacctagagagagcgacattagccatcatcggccttatcggccttaaaggatccatcttatcaggcacagagctccaagcacgatgggtcacaagagtattcaaaggactctgtaagatacctccatcccaaaaattgatgatggaggctactgaaaaggaacagctcattaaaaggggagtgtttaaagacaccagcaaagacaaatttgactacattgcctacatggatgatatcgctgcctgcataggcacaaagcccagcatcccacttctgttcctcaaggatcccagactagcttgggaagttttctttggaccatgtactccttatcagtaccgcctcatgggccctggaaaatgggatggagccagaaatgccatcctgacccagtgggacagaacattgaaacctttaaaaactcgaattgtccctgattcctccaagcctgcctccatgtcacattatttaaaagcctggggggcacctgtcctacttgcctctcttctacttatctgtaaatcttcacttttcttgaaattggtgagagataaactacaggacagaatgtccccttacctagtaagtctttggcgaggatgaacctgattgttacaagggttacaccaagtcatgctaattctatctccaagtatcttgtgcatccctcctctgctctccatcataactgctattagccaaattcaggcccagtcatctcctatctgaattattgtattatcttcttctttgttttcagtaccctctttcttgccaccctttccaatgcatcttctaccctgctacctcagtgattattctaaaataaatatatatgatatggtttaaaaaaaaaa

SEQ ID NO: 40 - DNA, 1440 bp, Homo sapiens
ggtgtctccgcgtcgctgggtgggacttggctcggcggccatgggcaagcagaacagcaagctgcggcccgagatgttgcaggacctgcgagagaacacagagttctcagagctggagctgcaggagtggtacaagggcttcctcaaggactgccccacaggaatcctcaatgtggatgagttcaagaagatctacgccaacttctttccctatggtgacgcctccaagtttgccgagcacgtcttccgcacctttgacaccaacagcgatggcaccatagactttcgggagttcatcattgcgctgagcgtgacctcgcgcggccgcctggagcagaagctcatgtgggccttcagcatgtatgacctggacggcaacggctacatcagccgggaggagatgctggagatcgtgcaggccatttacaagatggtttcgtccgtgatgaagatgccggaggacgagtcgaccccggaaaagaggactgagaaaatcttccgccaaatggacacaaacaacgacggcaagctgtccttggaggagttcatccgcggggccaaaagcgacccgtccatcgtgcgtctgctgcagtgcgaccccagcagcgcctcccagttctgagaggagccaggttccccttcctccctcccttcaccggccccctcccggctcttagcttccactcccttgtgtgtattctggctgggggccagattggggaagcccttctccccgggtctgccctgtggggggcttccggaaaagggaaccctgcggtacccccaggccaaagcaagtaagcggttagcaccccccaatcccagaggcaacaatagagacacaggctgggttggtctgcccctcagtcaggcccccttacccacccaccagccccaaggcccgacccctcccccaaaggggcagtccccttcttgcaggtctcagcttgcggggtggggggagtcatgcccaggggaggagactttttatctggaggggagagaaggattctaggggtgtggagttggagaaagaggcttccttgagccacccttcccaccccagcccttgctggtccctaggccaagccaccaagtgaaaccttccaggatactagcccgccagctgtgggccccagaaagccagcctgccttttagcacttggatacacacagacccacggagctctctgtgtttggcctctcacacacacacaggcccatagacagatgggcagatgcacccagagccccatgcacagtgtcctgcgtgggaaagagacacggtccccctggctgagcccctgtcctcccctctgtccccccaaccgccccccctgcatgcagccaaatggagcatctctgttctttttaataatttcagaataaagtctcatttcagtgcaaaaaaaaaaaaaaaaaaaaaaaaaaaaaaaaaaa

SEQ ID NO: 41 - DNA, 1835 bp, Homo sapiens
aatacatcataaatcgtgaagcacagggttataacgaccacgatccacaaatcaagccctccaaaatcacccaaatgagctcgtactttgtaaactccttctcggggcgttatccaaatggcccggactatcagttgctaaattatggcagtggcagctctctgagcggctcttacagggatcccgctgccatgcacaccggctcttacggctacaattacaatgggatggacctcagcgtcaaccgctcctcggcctcctccagccactttggggcggtgggcgagagctcgcgcgccttccccgcgcccgcccaggagccccgcttcaggcaagcggcttcgagctgctccctgtcctcgcccgagtccctgccctgcaccaacggcgacagccacggcgccaagccctctgcttcgtccccctccgaccaggcgacctcagccagctccagcgccaatttcaccgaaatagacgaggccagcgcgtcctcggagcctgaggaagcggcaagccagctaagcagccccagcctagctcgggcgcagccagagcccatggccacctccacagccgcgcccgaggggcagactccgcagatattcccctggatgaggaagcttcacatcagccatgatatgaccgggccggacgggaaaagggcccggaccgcgtatacccgctaccagaccctggagctggaaaaggagttccacttcaaccgctacctgacccggcgacggcgcatcgagatcgcccacgcactctgcctgtccgagcgccagatcaagatctggttccagaaccggcgcatgaagtggaagaaggacaacaaattgaaaagtatgagcctggctacagctggcagcgccttccagccctgagcccgcccagaggagcccagcggcccaagagcccgtgccacccccagccctggcccctccaatcctccccgctctgccgccgcccgctggggaccggttcccacaagcctgcctcgccttgtgttacgatatttcgtttgatcttaggtcttcctgtggctccctctctcctggactggttatcttgttattattgttaataataataattattattattttccttccatgctcccaactcccttctgcttgtcccaaatccgccagtgtttctgaatgtttgtgtctgtggttgcagtctttcccccaggaaaaaaaaaaaaagaaattcgcatgtttaatgtgaactctcccctccccatctgtgttctaacttatttataaaaagatgatcgctgtattttgagtttcagctggaaacttctgtaaggggcagcagttgaggtggggtagtgccgcagtggggtcaagctgagctggcttcggagatggagtcccttttcattctcctcctcctccctcctcactccctaggcccaagtctcctaggggcttggtcctagggtgggaaggggctagggaggaccaaagggatggtattgagaagagagaaagaagatagtgagatttaagttcctgctgcctgggtaggccccacaaggcctggtctgggagtatacggaaacaaaaatgatcctcagtgcaaaatgtcttgtgtatttctctgtgaatccatgggtctggctagagggcccaaagcttgtaaatatggggatagtctgggtcagacccatctctcccttacccatcttgcttccaagaccatttgtagtgagcgagtggatgctgtgctacgtgtgaaatctgtctttgcggggcctgtctcagtgattcgcttttggtatttgtttgtagctttcctggaagtcaaataaatgtttcccccactcc

SEQ ID NO: 42 - DNA, 1783 bp, Homo sapiens
tcgagcccgctttccagggaccctacctgagggcccacaggtgaggcagcctggcctagcaggccccacgccaccgcctctgcctccaggccgcccgctgctgcggggccaccatgctcctgcccaggcctggagactgacccgaccccggcactacctcgaggctccgcccccacctgctggaccccagggtcccaccctggcccaggaggtcagccagggaatcattaacaagaggcagtgacatggcgcagaaggagggtggccggactgtgccatgctgctccagacccaaggtggcagctctcactgcggggaccctgctacttctgacagccatcggggcggcatcctgggccattgtggctgttctcctcaggagtgaccaggagccgctgtacccagtgcaggtcagctctgcggacgctcggctcatggtctttgacaagacggaagggacgtggcggctgctgtgctcctcgcgctccaacgccagggtagccggactcagctgcgaggagatgggcttcctcagggcactgacccactccgagctggacgtgcgaacggcgggcgccaatggcacgtcgggcttcttctgtgtggacgaggggaggctgccccacacccagaggctgctggaggtcatctccgtgtgtgattgccccagaggccgtttcttggccgccatctgccaagactgtggccgcaggaagctgcccgtggaccgcatcgtgggaggccgggacaccagcttgggccggtggccgtggcaagtcagccttcgctatgatggagcacacctctgtgggggatccctgctctccggggactgggtgctgacagccgcccactgcttcccggagcggaaccgggtcctgtcccgatggcgagtgtttgccggtgccgtggcccaggcctctccccacggtctgcagctgggggtgcaggctgtggtctaccacgggggctatcttccctttcgggaccccaacagcgaggagaacagcaacgatattgccctggtccacctctccagtcccctgcccctcacagaatacatccagcctgtgtgcctcccagctgccggccaggccctggtggatggcaagatctgtaccgtgacgggctggggcaacacgcagtactatggccaacaggccggggtactccaggaggctcgagtccccataatcagcaatgatgtctgcaatggcgctgacttctatggaaaccagatcaagcccaagatgttctgtgctggctaccccgagggtggcattgatgcctgccagggcgacagcggtggtccctttgtgtgtgaggacagcatctctcggacgccacgttggcggctgtgtggcattgtgagttggggcactggctgtgccctggcccagaagccaggcgtctacaccaaagtcagtgacttccgggagtggatcttccaggccataaagactcactccgaagccagcggcatggtgacccagctctgaccggtggcttctcgctgcgcagcctccagggcccgaggtgatcccggtggtgggatccacgctgggccgaggatgggacgtttttcttcttgggcccggtccacaggtccaaggacaccctccctccagggtcctctcttccacagtggcgggcccactcagccccgagaccacccaacctcaccctcctgacccccatgtaaatattgttctgctgtctgggactcctgtctaggtgcccctgatgatgggatgctctttaaataataaagatggttttgatt

SEQ ID NO: 43 - DNA, 1056 bp, Homo sapiens
gtctgcgcggagtctgagcggcgctcgtcccgtcccaaggccgacgccagcacgccgtcatggcccccgcagcggcgacggggggcagcaccctgcccagtggcttctcggtcttcaccaccttgcccgacttgctcttcatctttgagtttatcttcgggggcctggtgtggatcctggtggcctcctccctggtgccctggcccctggtccagggctgggtgatgttcgtgtctgtgttctgcttcgtggccaccaccaccttgatcatcctgtacataattggagcccacggtggagagacttcctgggtcaccttggacgcagcctaccactgcaccgctgccctcttttacctcagcgcctcagtcctggaggccctggccaccatcacgatgcaagacggcttcacctacaggcactaccatgaaaacattgctgccgtggtgttctcctacatagccactctgctctacgtggtccatgcggtgttctctttaatcagatggaagtcttcataaagccgcagtagaacttgagctgaaaacccagatggtgttaactggccgccccactttccggcataactttttagaaaacagaaatgcccttgatggtggaaaaaagaaaacaaccacccccccactgcccaaaaaaaaaagccctgccctgttgctcgtgggtgctgtgtttactctcccgtgtgccttcgcgtccgggttgggagcttgctgtgtctaacctccaactgctgtgctgtctgctagggtcacctcctgtttgtgaaaggggaccttcttgttcgggggtgggaagtggcgaccgtgacctgagaaggaaagaaagatcctctgctgacccctggagcagctctcgagaactacctgttggtattgtccacaagctctcccgagcgccccatcttgtgccatgttttaagtcttcatggatgttctgcatgtcatggggactaaaactcacccaacagatctttccagaggtccatggtggaagacgataaccctgtgaaatactttataaaatgtcttaatgttc

SEQ ID NO: 44 - DNA, 4077 bp, Homo sapiens
gaattcccagctctctgctcgctctgctcgcagtcacagacacttgagcacacgcgtacacccagacatcttcgggctgctattggattgactttgaaggttctgtgtgggtcgccgtggctgcatgtttgaatcaggtggagaagcacttcaacgctggacgaagtaaagattattgttgttattttttttttctctctctctctctcttaagaaaggaaaatatcccaaggactaatctgatcgggtcttccttcatcaggaacgaatgcaggaatttgggaactgagctgtgcaagtgctgaagaaggagatttgtttggaggaaacaggaaagagaaagaaaaggaaggaaaaaatacataatttcagggacgagagagagaagaaaaacggggactatggggagaaaaaagattcagattacgaggattatggatgaacgtaacagacaggtgacatttacaaagaggaaatttgggttgatgaagaaggcttatgagctgagcgtgctgtgtgactgtgagattgcgctgatcatcttcaacagcaccaacaagctgttccagtatgccagcaccgacatggacaaagtgcttctcaagtacacggagtacaacgagccgcatgagagccggacaaactcagacatcgtggagacgttgagaaagaagggccttaatggctgtgacagcccagaccccgatgcggacgattccgtaggtcacagccctgagtctgaggacaagtacaggaaaattaacgaagatattgatctaatgatcagcaggcaaagattgtgtgctgttccacctcccaacttcgagatgccagtctccatcccagtgtccagccacaacagtttggtgtacagcaaccctgtcagctcactgggaaaccccaacctattgccactggctcacccttctctgcagaggaatagtatgtctcctggtgtaacacatcgacctccaagtgcaggtaacacaggtggtctgatgggtggagacctcacgtctggtgcaggcaccagtgcagggaacgggtatggcaatccccgaaactcaccaggtctgctggtctcacctggtaacttgaacaagaatatgcaagcaaaatctcctcccccaatgaatttaggaatgaataaccgtaaaccagatctccgagttcttattccaccaggcagcaagaatacgatgccatcagtgtctgaggatgtcgacctgcttttgaatcaaaggataaataactcccagtcggctcagtcattggctaccccagtggtttccgtagcaactcctactttaccaggacaaggaatgggaggatatccatcagccatttcaacaacatatggtaccgagtactctctgagtagtgcagacctgtcatctctgtctgggtttaacaccgccagcgctcttcaccttggttcagtaactggctggcaacagcaacacctacataacatgccaccatctgccctcagtcagttgggagcttgcactagcactcatttatctcagagttcaaatctctccctgccttctactcaaagcctcaacatcaagtcagaacctgtttctcctcctagagaccgtaccaccaccccttcgagatacccacaacacacgcgccacgaggcggggagatctcctgttgacagcttgagcagctgtagcagttcgtacgacgggagcgaccgagaggatcaccggaacgaattccactcccccattggactcaccagaccttcgccggacgaaagggaaagtccctcagtcaagcgcatgcgactttctgaaggatgggcaacatgatcagattattacttactagtttttttttttttcttgcagtgtgtgtgtgtgctataccttaatggggaaggggggtcgatatgcattatatgtgccgtgtgtggaaaaaaaaaaagtcaggtactctgttttgtaaaagtacttttaaattgcctcagtgatacagtataaagataaacagaaatgctgagataagcttagcacttgagttgtacaacagaacacttgtacaaaatagattttaaggctaacttcttttcactgttgtgctcctttgcaaaatgtatgttacaatagatagtgtcatgttgcaggttcaacgttatttacatgtaaatagacaaaaggaaacatttgccaaaagcggcagatctttactgaaagagagagcagctgttatgcaacatatagaaaaatgtatagatgcttggacagacccggtaatgggtggccattggtaaatgttaggaacacaccaggtcacctgacatcccaagaatgctcacaaacctgcaggcatatcattggcgtatggcactcattaaaaaggatcagagaccattaaaagaggaccatacctattaaaaaaaaatgtggagttggagggctaacatatttaattaaataaataaataaatctgggtctgcatctcttattaaataaaaatataaaaatatgtacattacattttgcttattttcatataaaaggtaagacagagtttgcaaagcatttgtggctttttgtagtttacttaagccaaaatgtgtttttttccccttgatagcttcgctaatattttaaacagtcctgtaaaaaaccaaaaaggactttttgtatagaaagcactaccctaagccatgaagaactccatgctttgctaaccaagataactgttttctctttgtagaagttttgtttttgaaatgtgtatttctaattatataaaatattaagaatcttttaaaaaaatctgtgaaattaacatgcttgtgtatagctttctaatatatataatattatggtaatagcagaagttttgttatcttaatagcgggaggggggtatatttgtgcagttgcacatttgagtaactattttctttctgttttcttttactctgcttacattttataagtttaaggtcagctgtcaaaaggataacctgtggggttagaacatatcacattgcaacaccctaaattgtttttaatacattagcaatctattgggtcaactgacatccattgtatatactagtttctttcatgctatttttattttgttttttgcatttttatcaaatgcagggcccctttctgatctcaccatttcaccatgcatcttggaattcagtaagtgcatatcctaacttgcccatattctaaatcatctggttggttttcagcctagaatttgatacgctttttagaaatatgcccagaatagaaaagctatgttggggcacatgtcctgcaaatatggccctagaaacaagtgatatggaatttacttggtgaataagttataaattcccacagaagaaaaatgtgaaagactgggtgctagacaagaaggaagcaggtaaagggatagttgctttgtcatccgtttttaattattttaactgacccttgacaatcttgtcagcaatataggactgttgaacaatcccggtgtgtcaggacccccaaatgtcacttctgcataaagcatgtatgtcatctattttttcttcaataaagagatttaatagccatttcaagaaatcccataaagaacctctctatgtccctttttttaatttaaaaaaatgactcttgtctaatattcgtctataagggattaattttcagaccctttaataagtgagtgccataagaaagtcaatatatattgtttaaaagatatttcagtctaggaaagattttccttctcttggaatgtgaagatctgtcgattcatctccaatcatatgcattgacatacacagcaaagaagatataggcagtaatatcaacactgctatatcatgtgtaggacatttcttatccattttttctcttttacttgcatagttgctatgtgtttctcattgtaaaaggctgccgctgggtggcagaagccaagagaccttattaactaggctatatttttcttaacttgatctgaaatccacaattagaccacaatgcacctttggttgtatccataaaggatgctagcctgccttgtactaatgttttatatatt

SEQ ID NO: 45 - DNA, 866 bp, Homo sapiens
cccgcgccccggatatgctgggacagcccgcgcccctagaacgctttgcgtcccgacgcccgcaggtcctcgcggtgcgcaccgtttgcgacttgccccccccgccccccccgccgccccttggtacttggaaaaatggacaaggattgtgaaatgaaacgcaccacactggacagccctttggggaagctggagctgtctggttgtgagcagggtctgcacgaaataaagctcctgggcaaggggacgtctgcagctgatgccgtggaggtcccagcccccgctgcggttctcggaggtccggagcccctgatgcagtgcacagcctggctgaatgcctatttccaccagcccgaggctatcgaagagttccccgtgccggctcttcaccatcccgttttccagcaagagtcgttcaccagacaggtgttatggaagctgctgaaggttgtgaaattcggagaagtgatttcttaccagcaattagcagccctggcaggcaaccccaaagccgcgcgagcagtgggaggagcaatgagaggcaatcctgtccccatcctcatcccgtgccacagagtggtctgcagcagcggagccgtgggcaactactccggaggactggccgtgaaggaatggcttctggcccatgaaggccaccggttggggaagccaggcttgggagggagctcaggtctggcaggggcctggctcaagggagcgggagctacctcgggctccccgcctgctggccgaaactgagtatgtgcagtaggatggatgtttgagcgacacacacgtgtaacactgcatcggatgcggggcgtggaggcaccgctgtattaaaggaagtggcagtgtcctgggaa

SEQ ID NO: 46 - DNA, 2731 bp, Homo sapiens
gcgcttggcgggagatagaaaagtgcttcaacccgcgccggcggcgactgcagttcctgcgagcgaggagcgcgggacctgctgacacgctgacgccttcgagcgcggcccggggcccggagcggccggagcagcccgggtcctgaccccggcccggctcccgctccgggctctgccggcgggcgggcgagcgcggcgcggtccgggccggggggatgtctcggcggacgcgctgcgaggatctggatgagctgcactaccaggacacagattcagatgtgccggagcagagggatagcaagtgcaaggtcaaatggacccatgaggaggacgagcagctgagggccctggtgaggcagtttggacagcaggactggaagttcctggccagccacttccctaaccgcactgaccagcaatgccagtacaggtggctgagagttttgaatccagaccttgtcaaggggccatggaccaaagaggaagaccaaaaagtcatcgagctggttaagaagtatggcacaaagcagtggacactgattgccaagcacctgaagggccggctggggaagcagtgccgtgaacgctggcacaaccacctcaaccctgaggtgaagaagtcttgctggaccgaggaggaggaccgcatcatctgcgaggcccacaaggtgctgggcaaccgctgggccgagatcgccaagatgttgccagggaggacagacaatgctgtgaagaatcactggaactctaccatcaaaaggaaggtggacacaggaggcttcttgagcgagtccaaagactgcaagcccccagtgtacttgctgctggagctcgaggacaaggacggcctccagagtgcccagcccacggaaggccagggaagtcttctgaccaactggccctccgtccctcctaccataaaggaggaggaaaacagtgaggaggaacttgcagcagccaccacatcgaaggaacaggagcccatcggtacagatctggacgcagtgcgaacaccagagcccttggaggaattcccgaagcgtgaggaccaggaaggctccccaccagaaacgagcctgccttacaagtgggtggtggaggcagctaacctcctcatccccgctgtgggttctagcctctctgaagccctggacttgatcgagtcggaccctgatgcttggtgtgacctgagtaaatttgacctccctgaggaaccatctgcagaggacagtatcaacaacagcctagtgcagctgcaagcgtcacatcagcagcaagtcctgccaccccgccagccttccgccctggtgcccagtgtgaccgagtaccgcctggatggccacaccatctcagacctgagccggagcagccggggcgagctgatccccatctcccccagcactgaagtcgggggctctggcattggcacaccgccctctgtgctcaagcggcagaggaagaggcgtgtggctctgtcccctgtcactgagaatagcaccagtctgtccttcctggattcctgtaacagcctcacgcccaagagcacacctgttaagaccctgcccttctcgccctcccagtttctgaacttctggaacaaacaggacacattggagctggagagcccctcgctgacatccaccccagtgtgcagccagaaggtggtggtcaccacaccactgcaccgggacaagacacccctgcaccagaaacatgctgcgtttgtaaccccagatcagaagtactccatggacaacactccccacacgccaaccccgttcaagaacgccctggagaagtacggacccctgaagcccctgccacagaccccgcacctggaggaggacttgaaggaggtgctgcgttctgaggctggcatcgaactcatcatcgaggacgacatcaggcccgagaagcagaagaggaagcctgggctgcggcggagccccatcaagaaagtccggaagtctctggctcttgacattgtggatgaggatgtgaagctgatgatgtccacactgcccaagtctctatccttgccgacaactgccccttcaaactcttccagcctcaccctgtcaggtatcaaagaagacaacagcttgctcaaccagggcttcttgcaggccaagcccgagaaggcagcagtggcccagaagccccgaagccacttcacgacacctgcccctatgtccagtgcctggaagacggtggcctgcggggggaccagggaccagcttttcatgcaggagaaagcccggcagctcctgggccgcctgaagcccagccacacatctcggaccctcatcttgtcctgaggtgttgagggtgtcacgagcccattctcatgtttacaggggttgtgggggcagagggggtctgtgaatctgagagtcattcaggtgacctcctgcagggagccttctgccaccagcccctccccagactctcaggtggaggcaacagggccatgtgctgccctgttgccgagcccagctgtgggcggctcctggtgctaacaacaaagttccacttccaggtctgcctggttccctccccaaggccacagggagctccgtcagcttctcccaagcccacgtcaggcctggcctcatctcagaccctgcttaggatgggggatgtggccaggggtgctcctgtgctcaccctctcttggtgcatttttttggaagaataaaattgcctctctcttaaaaaaaaaaaaaaaaaa

SEQ ID NO: 47 - DNA, 3058 bp, Homo sapiens
ggcggaggcagcccgagggggcggttgcatgtgtgccagacgttcgtagcccactgagcttcctcacgccggctgtcgcagcgcctagccccacccggcggcctctcctgcgcttccggggccgtggcgagctagtgcgcctgcgtgccggcccatccgcgcgccttgcagctgtccttgcgtcggccagcggccagacagttcctgcagcgcttaccgcctggcctctcggttccgcggcgcaccggagggcagcatgtcgcggcggcggcacagcgacgagaacgacggtgggcagcctcacaaaaggagaaagacctctgatgcaaatgaaactgaagatcatttggaatctttaatatgtaaagtaggagaaaagagtgcctgctctttggagagcaacctagaaggcttggctggtgttttggaagctgatcttcctaactacaagagcaagatcttaaggcttctttgtacagttgcacgcctattacctgagaagctgacaatttatacaacattagttggactactgaatgccaggaattacaattttggtggagaatttgtagaagccatgattcgtcaacttaaagaatcattgaaagcaaacaattataatgaagccgtgtatttggtccgttttttatctgatcttgtgaattgtcatgtgattgccgccccatcaatggttgctatgtttgaaaattttgtaagcgtaactcaggaagaagatgtacctcaggtgcgacgagattggtatgtgtatgcatttctgtcatctttgccctgggttggaaaggagttgtacgaaaagaaagatgcagagatggaccgcatctttgccaacactgaaagctatcttaaaagacgccaaaagactcatgtacccatgttacaggtatggactgctgataaaccacatccacaagaagagtatttagattgcctgtgggcccagattcagaaattgaaaaaggatcgctggcaggaacggcacatcctaagaccttatcttgcctttgacagcatcctgtgtgaagcactgcagcacaatctgcctccttttacaccacctcctcacactgaagattcagtgtacccaatgccaagggtcatcttcagaatgtttgattacacagatgatcccgagggtcctgtcatgccagggagtcattcagtggaaagatttgtaatagaagagaatcttcactgcatcattaagtcccactggaaggaaaggaagacttgtgctgcacagttagtgagctatccagggaagaacaagatccccttgaactaccacatagttgaggtgatctttgcagagctgtttcaacttccagcaccccctcacattgatgtgatgtacacaacactcctcattgaactgtgcaaacttcaacctggctctctaccccaagttcttgcacaggcaactgaaatgctatacatgcgtttggacacaatgaacactacctgtgtagacaggtttattaattggttttctcatcatctaagtaacttccagttccgttggagctgggaagattggtcagattgtcttagtcaagatcctgaaagtcccaaaccgaagtttgtaagagaagttctagaaaaatgtatgaggttgtcttaccatcagcgtatattagatattgttcctcctaccttctcagctctgtgtcctgcaaacccaacctgcatttacaagtatggagatgaaagtagcaattctcttcctggacattctgttgccctctgtttagctgttgcctttaaaagtaaggcaaccaatgatgaaatcttcagcattctgaaagatgtaccaaatcctaaccaggatgatgacgacgatgaaggattcagttttaacccattgaaaatagaagtctttgtacagactctgctacacttggcagccaaatcattcagccactccttcagtgctcttgcaaagtttcacgaagtcttcaaaaccctagctgaaagtgatgaaggaaagttacatgtgctaagagttatgtttgaggtctggaggaaccatccacagatgattgctgtactagtggataagatgattcgtacacaaatagttgattgtgctgccgtagcaaattggatcttctcttcagaactatctcgtgactttaccagattgtttgtttgggaaattttgcactctacaattcgtaagatgaacaaacatgtcctgaagatccagaaagagctggaagaagctaaagagaaacttgctaggcaacacaaacggcgaagtgatgatgacgacagaagcagtgacaggaaagacggggttcttgaggaacaaatagaacgacttcaggaaaaagtggaatctgctcagagtgaacaaaagaatcttttcctcgttatatttcagcggtttatcatgatcttgaccgagcacctagtacgatgcgaaactgatgggaccagtgtattaacaccatggtataagaactgtatagagaggctgcagcagatcttcctacagcatcaccaaataatccagcagtacatggtgaccctggagaaccttctcttcactgctgaattagaccctcatatcttggccgtgttccagcagttctgtgccctgcaggcctaagggtcattttttcctcatgtcaaggtttttttgatatcttaaaataatttgtcttattttttgatggtttgaatgcttgctttcttgtagtatcctttcacttgttaaaggaaacaaaggggaagaggacagtgaatgaacatggcattacttttaattgccctgaaaagcaaatacttcctaacggcagtaatgtgactatgaccatgatatattatatatgtgacagatacaaattctctgtgatcagtttgttattttttttctccttaaggcacaaaataattggtttgaggtatgtgaaacactagaggtcaaccttacatagtatatagaactgatgggtttacccagctacccagtagcataacttttcacagctcggggatgaattaacatggctgaaataaaactaaaagtatggttttt

SEQ ID NO: 48 - DNA, 5441 bp, Homo sapiens
agtgggggcctgatagcgcggcggtgtggaccgcgcggccgaagagcgcggcgcccagagcgcgggccgctcgcggagccacagcccgagccgggtcccagccggagccgagccccagccgagccgagccgggcccggagcgcccggtgcccgcagccatgccggccggccgcgccgcgcgcacctgtgcgctgctcgccctctgcctcctgggcgccggggcccaggatttcgggccgacgcgcttcatctgcacctcggtgcccgtggacgccgacatgtgcgccgcgtccgtggccgccggcggcgccgaggagctccggagcagcgtgctgcagctccgcgagacggtgctgcagcagaaggagaccatcctgagccagaaggagaccatccgcgagctgaccgccaagctgggccgctgcgagagccagagcacgctggaccccggagccggcgaggcccgggcgggcggcggccgcaagcagcccggctcgggcaagaacaccatgggcgacctgtcccggacaccggccgccgagacgctcagccaactcgggcaaactttgcaatcgctcaaaacccgcctggagaacctcgagcagtacagccgcctcaattcctccagccagaccaacagcctcaaggatctgctgcagagcaagatcgatgagctggagaggcaggtgctgtcccgggtgaacaccctggaggagggcaaggggggccccaggaacgacaccgaggagagggtcaagatcgagaccgccctgacctccctgcaccagcggatcagcgagctcgagaaaggtcagaaagacaaccgccctggagacaagttccagctcacattcccactgcggaccaactatatgtatgccaaggtgaagaagagcctgccagagatgtacgccttcactgtctgcatgtggctcaagtccagcgccacgccaggtgtgggcacgcccttctcctacgctgtgcccggccaggccaacgagctggtcctcattgagtggggcaacaaccccatggagatcctcatcaatgacaaggtggccaagttgccttttgtcatcaatgatggcaagtggcaccacatctgtgtcacctggaccacccgggacggggtctgggaggcctaccaggatggcacgcagggtggcagtggcgagaacttggcgccctatcaccccatcaagccccagggcgtgctggtgctgggccaggagcaggacactctgggtggtgggtttgatgccacccaggcatttgtgggtgagctggcccacttcaacatctgggaccgcaagctgacccccggggaggtgtacaacctggccacctgcagcaccaaggctctgtccggcaatgtcatcgcctgggctgaatcccacatcgagatctacggaggggccaccaagtggaccttcgaggcctgtcgccagatcaactgagcacggcaggccaggctgagcccgcccgccctcgccccctgcttgtgcggcgatgatctgttttgtgcgtctcttctctcccttttccccaggaatgaaccgaggccgtcgcccctgcacacgcacacgcacacagcctggttttgtcctcatgcacacgaagcagcccctgctcccatctgtccctgaggaagccccacttctctgtaggagcccggactctctcaggcatgccccattcacagctgaagtgggtgctgcaacgtcttgaacaaggcagaagttggtgagaggatctgtgtgtgcgtgtctacatgtgtgtgtctacgtgtgtgcgtgcgtggctgggggaggccttttctttgaggacgtacctcatttccttctttcttctggctttggaaaaatctcatgatgaaaattcatatttgccaactttgttagctgcgtgcgtgctttggggttggtgcaacctcagtacacgcatttgtctttgtttgcaaacctttctcagagcgacatatctttatattgatgtaataaatgtcttttagtggtttgtcaaaggccgggggcgggggctctctacagagaatttttattttgtaatagaagtgaactgtctctgaagggtgaaggcaggccgtcctgggatggtaccctgtgctctcccgtggaggagaggggatggctgaggacactggcccttaccccagggccagacagcatccatccctgctgtttgcatctgagagcagcatggggcctgggaggtcggcctgtgtgcccagctcagctagctctgccccaggacggccctgccctcgaccttcccacctcctcagatcctgcaaggctggggtctgcccctcccttctcacctctggagctgtgctgcactgcttcagcccagagggccctgagagaggagcgtgccacccacagcccgggaagccgggccccagcacccctctcctttggcctccggcagtgcagaccagaggggaccttttaaggaaagaagccgtgtttcgatgaagacctggccacatggggccactgggacttcaacccagcccatcggtgggaaggtcctttttgggggcctttgacagccatatccctcccagcacaccaggcgccaggtgagctggttcagacccctccaggggtactccagagacctcacgtgtggagccaggcctggccagggcaggggcctgaaacccactcctccatctcatggggctcacggcctacagcagcccacaagctgccactggccggcgacactgacacctgagcagtgtccagaacctttttgcctttttttgttccccgtgaaaagcaacatggacatttccttctagtccttccaaggaggggagagaagtgtatgtgcatttgtgtgtgtgtgtgtgtgttgtgtgtgtgtgtgcgctaagtgagaaagagagcaggctcgggaggccctgcccagggtaggaggagcttcctgctttgcaccatctggtggtcgcacgccctgagggcaccccgactctgtctccaggagtctcatcagcaaaccgctgacaagtctttctagaaattctactgcactgcctggctcagctgcagctgcagacatttctgcaggaggagcaggtgtttctgtcttctgttccttctagggccacctgtccccttaaacacaggtccacgttgtgtcaagaacctagtgcatctgtgtgtgtctgtcagtgtctctgtgtcagtgttcttgtgggtgtctgcacggtacccggccgccgttctgcaatgcatcactcccgcagaggggggtgcagatcaggcgccgtgctgcgcgttgttgttcaacagtggctttttcttagataatcgtgcttcctcagcgcccgtcgggttgtggcatccttggatctgcagggatcttctccgtttgcatgttcctcggggtggcgtgttccttgctccctgggtccgacatgtgttcccgcacctgcatggactgccccggttctgtgttgtgtgccgagtgccgcccagtgttctgtgaccacccgtgtagctactgaaaatggctgggtaagcaagtcaagggtgttggaggaggtcaagagagagctcagtttccctctccccctccccaaacacaccaagaagcatttttaacgtgtaggttgagaacaagcctaaaggattcccacagctgggagccagcaagagagcttggagtcgcctctctagaccagatctagccccaccctcactccagccatctcggagcccttgtgtaggcaacgcccggtgcgggctgtgtggggtgctcccctgccagcacctccggccagccccgcccctgccgatctactggaccgcagaccaccttctgcccccgtgggccaggtgggagctgtccgttcaggaccatgagccatcctctgccctgactagcgaggggcagagcacaccccagtgcttacgcctccacccctgcagcctcctggcccgctcaccttcctcacccctcctctgacccacccatggtgccagggccgaagctgacctttagctccctcctgccccttgctagggtctgagccaagcccctcgactccctcactgtgttgacacttggcactttgctggccccgagaaaggtcgatgacacagccgcaaatctaatccacgtagttcccatttactccttaatctgattgatgttccctcttgcactgaataatacatgcctctctcaggtaagccattttataaaacaagaagataaaaagcactgttgaggcagtgtttgcttttgccgagctggtgtccgacagctccctgggtgtccggggtgggagagctgttgacagaagctctccgggccctcaggggcttagatcccacttgagtcgtaagccttcttgcttttgataacacagtattatttctcttactgtagaagaaaaagtttattaccaaacaagagtatttttatgaaagaaaaggacaaacctataaattaactcaacctatatctcccttgaaaatactttcaggctccaccaaaacgtagaactgaaagcatgtattttggaagaaagagatacattttgtatgctttcttttccttttgtagattcccagtttattttctaagactgcaaagatcactttgtcaccagccctgggacctgagaccaagggggtgtcttgtgggcagtgagggggtgaggagaggctggcatgaggttcagtcattccagtgagctccaaagaggggccacctgttctcaaaagcatgttggggaccaggaggtaaaactggccatttatggtgaacctgtgtcttggagctgacttactaagtggaatgagccgaggatttgaatatcagttctaaccttgatagaagaaccttgggttacatgtggttcacattaagaggatagaatcctttggaatcttatggcaaccaaatgtggcttgacgaagtcgtggtttcatctcttaaacacagtgtgtaaatttattcaactaacgatgggaaatgtattacttctgtacacagtggactgaagtgcaatttgttgaaagggaacaagtcattgaagagaaaaaaaaaaagcccaatacttagagtcccaattttgtctcatttgccaaaaaaaaaaaaaaaaaaaaaaagcaaaccccctatggttgatattgttataatgtatatactgtataatatgaaagagaatcgatgtatctcactttttcattatttgctaaccaaagctgtacatttttcatatgatctgcagccttttgggtatcaaatgggtcaaaaccatgggacctgccacctcccatcagcaattctggaaatgcactatttctactggtattcttgctttttttttttttttcattttcttgctgaaatgacatgaattgttgagtttatttttacccagtaaagagtggagaaagact

SEQ ID NO: 49 - DNA, 2516 bp, Homo sapiens
gaggtagaggaaaggtcttgacggggtggctggatccgtggcagaatccagttccagattctagacttgagggttctgggctgttggtctgtagaagcgaaggagagaaggactcaaatccaggccaagtgtatggctgtctgaggtattggaacagaaggaggtccattcctgttggtgacaacaccgtggccctgttctgggatgagcaaggtgtaaaggtttcccccaagaaagagcagctgagtccttgcatcttgtggcagctggtgtgcccagcactgagtctgtaggagctgaagccagcccggacccttctcatgggcagtgcccacctgtgctgaagtcctgcagcggtggcggtgtgaggagctgtgaaattagttgtaactgaaaatgtctgacggtctggataatgaagagaaacccccggctcctccactgaggatgaatagtaacaaccgggattcttcagcactcaaccacagctccaaaccacttcccatggcccctgaagagaagaataagaaagccaggcttcgctctatcttcccaggaggaggggataaaaccaataagaagaaggagaaagagcgcccagagatctctcttccttcagactttgagcatacgattcatgtggggtttgatgcagtcaccggggaattcactggaattccagagcaatgggcacgattactccaaacttccaacataacaaaattggaacagaagaagaacccacaagctgttctagatgttctcaaattctatgattccaaagaaacagtcaacaaccagaaatacatgagctttacatcaggagataaaagtgcacatggatacatagcagcccatccttcgagtacaaaaacagcatctgagcctccattggcccctcctgtgtctgaagaagaagatgaagaggaagaagaagaagaagatgaaaatgagccaccaccagttatcgcaccaagaccagagcatacaaaatcaatctatactcgttctgtggttgaatccattgcttcaccagcagtaccaaataaagaggtcacaccaccctctgctgaaaatgccaattccagtactttgtacaggaacacagatcggcaaagaaaaaaatccaagatgacagatgaggagatcttagagaagctaagaagcattgtgagtgttggggacccaaagaaaaaatacacaagatttgaaaaaattggtcaaggggcatcaggtactgtttatacagcactagacattgcaacaggacaagaggtggccataaagcagatgaaccttcaacagcaacccaagaaggaattaattattaatgaaattctggtcatgagggaaaataagaaccctaatattgttaattatttagatagctacttggtgggtgatgaactatgggtagtcatggaatacttggctggtggctctctgactgatgtggtcacagagacctgtatggatgaaggacagatagcagctgtctgcagagagtgcctgcaagctttggatttcctgcactcaaaccaggtgatccatagagatataaagagtgacaatattcttctcgggatggatggctctgttaaattgactgactttgggttctgtgcccagatcactcctgagcaaagtaaacgaagcactatggtgggaaccccatattggatggcacctgaggtggtgactcgaaaagcttatggtccgaaagttgatatctggtctcttggaattatggcaattgaaatggtggaaggtgaacccccttaccttaatgaaaatccactcagggcattgtatctgatagccactaatggaactccagagctccagaatcctgagagactgtcagctgtattccgtgactttttaaatcgctgtcttgagatggatgtggataggcgaggatctgccaaggagcttttgcagcatccatttttaaaattagccaagcctctctccagcctgactcctctgattatcgctgcaaaggaagcaattaagaacagcagccgctaagactgcaagccttacacctcaccatctccctcatgagtaagactgaaataaaactctgctgcaggaaagatggaagaaaagacagtcaaatggggtgggggttctttacctttcaaatgaatagaaacttcttataagcctttttcctactccctcagattatgtaatttatttgtaagcctgaatcgcagcccaaacagggcagcaatgttgaagtgaccataaagtggtcacttccaccgtgaagcgaaagagccagtagtgaatcccctcattttgtgcattcactttgaagaaaaaggtttctcaaagatgcacactccctcttcatagtgttgtgtttgtttttaagttagagagtagtccctcttgcattcaaacctccttcaaaactccttacccaatgtgatgtttttcacttgcattgtcattagatgtccagaaaaaaaaaagatgtcaaaatgtttttctaaaaaaagaaagca

SEQ ID NO: 50 - DNA, 1752 bp, Homo sapiens
cgggagccgagaggaggcggaggagatggcgtcccagccgccacctccccccaaaccctgggagacccgccgaattccgggagccggaccgggaccaggaccgggccccactttccaatctgctgatttgggtcctactttaatgacaagacctggacaaccagcacttaccagagtgcccccacctattcttccaaggccatcacagcagacaggaagtagcagtgtgaacacttttagacctgcttacagttcattttcttctggatatggtgcctatggaaattcattttatggaggctatagtccttatagttatggatataatgggctgggctacaaccgcctccgtgtagatgatcttccacccagtagatttgttcagcaagctgaagaaagcagcaggggtgcatttcagtccattgaaagtattgtgcatgcatttgcctctgtcagtatgatgatggatgctaccttttcagctgtctataacagtttcagggctgtattggatgtagcaaatcacttttcccgattgaaaatacactttacaaaagtgttttcagcttttgcattggttaggactatacggtatctttacagacggctacagcggatgttaggtttaagaagaggctctgagaatgaagacctctgggcagagagtgaaggaactgtggcatgccttggtgctgaggaccgagcagctacctcagcaaaatcttggccaatattcttgttctttgctgttatccttggtggtccttacctcatttggaaactattgtctactcacagtgatgaagtaacagacagcatcaactgggcaagtggtgaggatgaccatgtagttgccagagcagaatatgattttgctgccgtatctgaagaagaaatttctttccgggctggtgatatgctgaacttagctctcaaagaacaacaacccaaagtgcgtggttggcttctggctagccttgatggccaaacaacaggacttatacctgcgaattatgtcaaaattcttggcaaaagaaaaggtaggaaaacggtggaatcaagtaaagtttccaagcagcaacaatcttttaccaacccaacactaactaaaggagccacggttgctgattctttggatgaacaggaagctgcctttgaatctgtttttgttgaaactaataaggttccagttgcacctgattccattgggaaagatggagaaaagcaagatctttgatatctttcatgtttgcctgcagttgaacaatactttagagtactttttaaaattatttctcacaaagaaatgaatgtacaatccaatgaaaacatttgttattggctatttcaggtgttttgctgctagaaattattaaagttacacactagtatgttggtctggtgacctggttacattttattatacacattattggaccataaggacatttgtttcacctagattttaagattatggagactgctgtcatttttatcttatttaaatctctaggtttattggaagagtaagattgatgaactatagcatgcacagtttggtacagtagagatcattaatacttttaaaagttctacattaattgacttggaatccttagtaatggagtggtgacatgtcagtatgagaacaggcaaaaggtaaattttttttttttttttacaaccttaagtaatctcaataataaaattttctgatctgtattaaaaaaaaaaaaaaaaaaaaaaaaaaaa

SEQ ID NO: 51 - DNA, 2360 bp, Homo sapiens
acagtgcggagaccgcagccccggagcccgggccagggtccacctgtccccgcagcgccggctcgcgccctcctgccgcagccaccgagccgccgtctagcgccccgacctcgccaccatgagagccctgctggcgcgcctgcttctctgcgtcctggtcgtgagcgactccaaaggcagcaatgaacttcatcaagttccatcgaactgtgactgtctaaatggaggaacatgtgtgtccaacaagtacttctccaacattcactggtgcaactgcccaaagaaattcggagggcagcactgtgaaatagataagtcaaaaacctgctatgaggggaatggtcacttttaccgaggaaaggccagcactgacaccatgggccggccctgcctgccctggaactctgccactgtccttcagcaaacgtaccatgcccacagatctgatgctcttcagctgggcctggggaaacataattactgcaggaacccagacaaccggaggcgaccctggtgctatgtgcaggtgggcctaaagccgcttgtccaagagtgcatggtgcatgactgcgcagatggaaaaaagccctcctctcctccagaagaattaaaatttcagtgtggccaaaagactctgaggccccgctttaagattattgggggagaattcaccaccatcgagaaccagccctggtttgcggccatctacaggaggcaccgggggggctctgtcacctacgtgtgtggaggcagcctcatcagcccttgctgggtgatcagcgccacacactgcttcattgattacccaaagaaggaggactacatcgtctacctgggtcgctcaaggcttaactccaacacgcaaggggagatgaagtttgaggtggaaaacctcatcctacacaaggactacagcgctgacacgcttgctcaccacaacgacattgccttgctgaagatccgttccaaggagggcaggtgtgcgcagccatcccggactatacagaccatctgcctgccctcgatgtataacgatccccagtttggcacaagctgtgagatcactggctttggaaaagagaattctaccgactatctctatccggagcagctgaaaatgactgttgtgaagctgatttcccaccgggagtgtcagcagccccactactacggctctgaagtcaccaccaaaatgctgtgtgctgctgacccacagtggaaaacagattcctgccagggagactcagggggacccctcgtctgttccctccaaggccgcatgactttgactggaattgtgagctggggccgtggatgtgccctgaaggacaagccaggcgtctacacgagagtctcacacttcttaccctggatccgcagtcacaccaaggaagagaatggcctggccctctgagggtccccagggaggaaacgggcaccacccgctttcttgctggttgtcatttttgcagtagagtcatctccatcagctgtaagaagagactgggaagataggctctgcacagatggatttgcctgtgccacccaccagggcgaacgacaatagctttaccctcaggcataggcctgggtgctggctgcccagacccctctggccaggatggaggggtggtcctgactcaacatgttactgaccagcaacttgtctttttctggactgaagcctgcaggagttaaaaagggcagggcatctcctgtgcatgggtgaagggagagccagctcccccgacggtgggcatttgtgaggcccatggttgagaaatgaataatttcccaattaggaagtgtaacagctgaggtctcttgagggagcttagccaatgtgggagcagcggtttggggagcagagacactaacgacttcagggcagggctctgatattccatgaatgtatcaggaaatatatatgtgtgtgtatgtttgcacacttgtgtgtgggctgtgagtgtaagtgtgagtaagagctggtgtctgattgttaagtctaaatatttccttaaactgtgtggactgtgatgccacacagagtggtctttctggagaggttataggtcactcctggggcctcttgggtcccccacgtgacagtgcctgggaatgtattattctgcagcatgacctgtgaccagcactgtctcagtttcactttcacatagatgtccctttcttggccagttatcccttccttttagcctagttcatccaatcctcactgggtggggtgaggaccactcctgtacactgaatatttatatttcactatttttatttatatttttgtaattttaaataaaagtgatcaataaaatgtgatttttctgatgaaaaaaaaaaaaaaa

SEQ ID NO: 52 - DNA, 4242 bp, Homo sapiens
gaattcggcgctgagtgacccgagtcgggacgcgggctgcgcgcgcgggaccccggagcccaaacccggggcaggcgggcagctgtgcccgggcggcacggccagcttcctgatttctcccgattccttccttctccctggagcggccgacaatgtccaccacggtcaatgtagattcccttgcggaatatgagaagagccagatcaagagagccctggagctggggacggtgatgactgtgttcagcttccgcaagtccacccccgagcggagaaccgtccaggtgatcatggagacgcggcaggtggcctggagcaagaccgccgacaagatcgagggcttcttggatatcatggaaataaaagaaatccgcccagggaagaactccaaagatttcgagcgagcaaaagcagttcgccagaaagaagactgctgcttcaccatcctatatggcactcagttcgtcctcagcacgctcagcttggcagctgactctaaagaggatgcagttaactggctctctggcttgaaaatcttacaccaggaagcgatgaatgcgtccacgcccaccattatcgagagttggctgagaaagcagatatattctgtggatcaaaccagaagaaacagcatcagtctccgagagttgaagaccatcttgcccctgatcaactttaaagtgagcagtgccaagttccttaaagataagtttgtggaaataggagcacacaaagatgagctcagctttgaacagttccatctcttctataaaaaacttatgtttgaacagcaaaaatcgattctcgatgaattcaaaaaggattcgtccgtgttcatcctggggaacactgacaggccggatgcctctgctgtttacctgcatgacttccagaggtttctcatacatgaacagcaggagcattgggctcaggatctgaacaaagtccgtgagcggatgacaaagttcattgatgacaccatgcgtgaaactgctgagcctttcttgtttgtggatgagttcctcacgtacctgttttcacgagaaaacagcatctgggatgagaagtatgacgcggtggacatgcaggacatgaacaaccccctgtctcattactggatctcctcgtcacataacacgtaccttacaggtgaccagctgcggagcgagtcgtccccagaagcttacatccgctgcctgcgcatgggctgtcgctgcattgaactggactgctgggacgggcccgatgggaagccggtcatctaccatggctggacgcggactaccaagatcaagtttgatgacgtcgtgcaggccatcaaagaccacgcctttgttacctcgagcttcccagtgatcctgtccatcgaggagcactgcagcgtggagcaacagcgtcacatggccaaggccttcaaggaagtatttggcgacctgctgttgacgaagcccacggaggccagtgctgaccagctgccctcgcccagccagctgcgggagaagatcatcatcaagcataagaagctgggcccccgaggcgatgtggatgtcaacatggaggacaagaaggacgaacacaagcaacagggggagctgtacatgtgggattccattgaccagaaatggactcggcactactgcgccattgctgatgccaagctgtccttcagtgatgacattgaacagactatggaggaggaagtgccccaggatataccccctacagaactacattttggggagaaatggttccacaagaaggtggagaagaggacgagtgccgagaagttgctgcaggaatactgcatggagacggggggcaaggatggcaccttcctggttcgggagagcgagaccttccccaatgactacaccctgtccttctggcggtcaggccgggtccagcactgccggatccgctccaccatggagggcgggaccctgaaatactacttgactgacaacctgaggttcaggaggatgtatgccctcatccagcactaccgcgagacgcacctgccgtgcgccgagttcgagctgcggctcacggaccctgtgcccaaccccaacccccacgagtccaagccgtggtactatgacagcctgagccgcggagaggcagaggacatgctgatgaggattccccgggacggggccttcctgatccggaagcgagaggggagcgactcctatgccatcaccttcagggctaggggcaaggtaaagcattgtcgcatcaaccgggacggccggcactttgtgctggggacctccgcctattttgagagtctggtggagctcgtcagttactacgagaagcattcactctaccgaaagatgagactgcgctaccccgtgacccccgagctcctggagcgctacaatacggaaagagatataaactccctctacgacgtcagcagaatgtatgtggatcccagtgaaatcaatccgtccatgcctcagagaaccgtgaaagctctgtatgactacaaagccaagcgaagcgatgagctgagcttctgccgtggtgccctcatccacaatgtctccaaggagcccgggggctggtggaaaggagactatggaaccaggatccagcagtacttcccatccaactacgtcgaggacatctcaactgcagacttcgaggagctagaaaagcagattattgaagacaatcccttagggtctctttgcagaggaatattggacctcaatacctataacgtcgtgaaagcccctcagggaaaaaaccagaagtcctttgtcttcatcctggagcccaaggagcagggcgatcctccggtggagtttgccacagacagggtggaggagctctttgagtggtttcagagcatccgagagatcacgtggaagattgacagcaaggagaacaacatgaagtactgggagaagaaccagtccatcgccatcgagctctctgacctggttgtctactgcaaaccaaccagcaaaaccaaggacaacttagaaaatcctgacttccgagaaatccgctcctttgtggagacgaaggctgacagcatcatcagacagaagcccgtcgacctcctgaagtacaatcaaaagggcctgacccgcgtctacccaaagggacaaagagttgactcttcaaactacgaccccttccgcctctggctgtgcggttctcagatggtggcactcaatttccagacggcagataagtacatgcagatgaatcacgcattgttttctctcaacgggcgcacgggctacgttctgcagcctgagagcatgaggacagagaaatatgacccgatgccacccgagtcccagaggaagatcctgatgacgctgacagtcaaggttctcggtgctcgccatctccccaaacttggacgaagtattgcctgtccctttgtagaagtggagatctgtggagccgagtatggcaacaacaagttcaagacgacggttgtgaatgataatggcctcagccctatctgggctccaacacaggagaaggtgacatttgaaatttatgacccaaacctggcatttctgcgctttgtggtttatgaagaagatatgttcagcgatcccaactttcttgctcatgccacttaccccattaaagcagtcaaatcaggattcaggtccgttcctctgaagaatgggtacagcgaggacatagagctggcttccctcctggttttctgtgagatgcggccagtcctggagagcgaagaggaactttactcctcctgtcgccagctgaggaggcggcaagaagaactgaacaaccagctctttctgtatgacacacaccagaacttgcgcaatgccaaccgggatgccctggttaaagagttcagtgttaatgagaaccactccagctgtaccaggagaaatgcaacaagaggttaagagagaagagagtcagcaacagcaagttttactcatagaagctggggtatgtgtgtaagggtattgtgtgtgtgcgcatgtgtgtttgcatgtaggagaacgtgccctattcacactctgggaagacgctaatctgtgacatcttttcttcaagcctgccatcaaggacatttcttaagacccaactggcatgagttggggtaatttcctattattttcatcttggacaacttctaacttatatctttatagaggattccccaaaatgtgctcctcatttttggcctctcatgttccaaacctcattgaataaaaagcaatgaaaaccttg

SEQ ID NO: 53 - DNA, 1726 bp, Homo sapiens
gcggccgcgcggatcccacccagcccaccccgccccggccgacggctgcagctgacctggatccttcgagcgcccgccgaccgccagcgatcttccctcatcttccgggctggtttctgctgcgcgaggagcgctgccctcgccgcccctctcgccggacccccggcccccgatggctcggatggggcttgcgggcgccgctggacgctggtggggactcgctctcggcttgaccgcattcttcctcccaggcgtccactcccaggtggtccaggtgaacgactccatgtatggcttcatcggcacagacgtggttctgcactgcagctttgccaacccgcttcccagcgtgaagatcacccaggtcacatggcagaagtccaccaatggctccaagcagaacgtggccatctacaacccatccatgggcgtgtccgtgctggctccctaccgcgagcgtgtggaattcctgcggccctccttcaccgatggcactatccgcctctcccgcctggagctggaggatgagggtgtctacatctgcgagtttgctaccttccctacgggcaatcgagaaagccagctcaatctcacggtgatggccaaacccaccaattggatagagggtacccaggcagtgcttcgagccaagaaggggcaggatgacaaggtcctggtggccacctgcacctcagccaatgggaagcctcccagtgtggtatcctgggaaactcggttaaaaggtgaggcagagtaccaggagatccggaaccccaatggcacagtgacggtcatcagccgctaccgcctggtgcccagcagggaagcccaccagcagtccttggcctgcatcgtcaactaccacatggaccgcttcaaggaaagcctcactctcaacgtgcagtatgagcctgaggtaaccattgaggggtttgatggcaactggtacctgcagcggatggacgtgaagctcacctgcaaagctgatgctaaccccccagccactgagtaccactggaccacgctaaatggctctctccccaagggtgtggaggcccagaacagaaccctcttcttcaagggacccatcaactacagcctggcagggacctacatctgtgaggccaccaaccccatcggtacacgctcaggccaggtggaggtcaatatcacagaattcccctacaccccgtctcctcccgaacatgggcggcgcgccgggccggtgcccacggccatcattgggggcgtggcggggagcatcctgctggtgttgattgtggtcggcgggatcgtggtcgccctgcgtcggcgccggcacaccttcaagggtgactacagcaccaagaagcacgtgtatggcaacggctacagcaaggcaggcatcccccagcaccacccaccaatggcacagaacctgcagtaccccgacgactcagacgacgagaagaaggccggcccactgggtggaagcagctatgaggaggaggaggaggaggaggagggcggtggagggggcgagcgcaaggtgggcggcccccaccccaaatatgacgaggacgccaagcggccctacttcaccgtggatgaggccgaggcccgtcaggacggctacggggaccggactctgggctaccagtacgaccctgagcagctggacttggctgagaacatggtttctcagaacgacgggtctttcatttccaagaaggagtggtacgtgtag

SEQ ID NO: 54 - DNA, 1997 bp, Homo sapiens
cctccctccctccccgtctttcttaccccctccctttctctctctctctctctctcgctcgttccctaacattaaagagaaaatgctgctatccgtgacttccaggcccgggatttcgacttttggctacaatagaaacaacaagaagccatatgtgtcattggctcagcagatggcaccacctagcccaagcaacagtacacctaacagcagtagtggaagcaatggaaatgaccagctgagcaaaaccaacctatacatccgaggattgcaaccaggcactactgaccaagatcttgtcaagctgtgtcagccatatggcaagattgtttccactaaggccatactggacaagaccacaaacaaatgtaaaggctatggctttgtagattttgacagcccttcagcagcacagaaagctgtaacagcactgaaggccagcggtgtacaggcacagatggcaaagcaacaggaacaggaccccacaaatttatacatctcaaacctcccactgtcaatggatgagcaggaactggaggggatgctgaagccctttggccaggttatctccacccgtatccttcgagataccagtgggaccagcagaggtgttggctttgcaaggatggagtccacagagaagtgtgaagccatcatcacccactttaatggaaaatatattaagacaccccctggagtaccagccccatccgatcccttgctttgcaaatttgctgatggcgggccaaagaaacgacagaaccaaggaaaatttgtgcaaaatggacgggcttggccaaggaatgcagacatgggcgtcatggccttgacctatgaccccaccacagctcttcagaatgggttttacccagccccctataacatcacccccaacaggatgcttgctcagtctgcactctccccatacctttcctctcctgtgtcttcgtatcagagagtgactcagacatctcctctacaagtacctaacccatcctggatgcaccaccattcatacctcatgcagccttcaggttcagttctgacaccagggatggaccatcccatttctctccagcctgcctccatgatgggaccccttacccagcaactgggccatctctccctcagcagcacaggcacgtatatgccgacggctgcagctatgcaaggagcttacatctcccagtacacccctgtgccttcttccagtgtttcagtcgaggagagcagcggccaacagaaccaagtggcagtggacgcaccctcagagcatggggtctattctttccagttcaacaagtaacagtgggattcccctccccatctttactgaatagaaatgaattcttggagatactcatgctcccagattccagagggttaaccaggaatggagaccatccgtcggccctgctaaggactaacacttagccatcgtttttcacaggcctgggcctggaaaaagaaatctctacgttcctgccctttactattgctgatggagcctgggggaaccatcactttttttgtgtgctacattcaaggagatcaaaaaaacttttcttcttttgcaaagaaagctttttgtttttaactgcaacgtacttttcccctaccttgaagagacatggtggtcgcagcttctcatctatatgaaaaagttttcgatgtattggaattatttgggaatgcttttaaaacaatttgtaattatttctttacaaaccaaaacagaacagaaaggtgtggtgctggaacatcgatgaaggagccctacttactgagcttagttatggacttttttgatgcatgtgtgtatgtgttttaaaaagtatgcaggctctaaaaatgttattttgtaaagctctcagctcatgcaccccatctcctcttcacccatattatgccttctttctcttgtccagattcttctttttctcttttctaaacagctgagcctgcctactttgcccttttacagcttttaattttat

SEQ ID NO: 55 - DNA, 720 bp, Homo sapiens
gggggggggcggagggcgctcatttccgggccgcccaccacccgcgtagcaccggcagccgctgtcccggcagtctccagccgtcccgcccgcttgtggccaaactggctccagtcactcccgaaatgccagtcgacttcactgggtactggaagatgttggtcaacgagaatttcgaggagtacctgcgcgccctcgacgtcaatgtggccttgcgcaaaatcgccaacttgctgaagccagacaaagagatcgtgcaggacggtgaccatatgatcatccgcacgctgagcacttttaggaactacatcatggacttccaagttgggaaggagtttgaggaggatctgacaggcatagatgaccgcaagtgcatgacaacagtgagctgggacggagacaagctccagtgtgtgcagaagggtgagaaggaggggcgtggctggacccagtggatcgagggtgatgagctgcacctagagatgagagtggaaggtgtggtctgcaagcaagtattcaagaaggtgcagtgaggcccaagcagacaaccttgtcccaaccaatcagcaggatgtgtgagccaggatccctctttgcacagcatgaggcaaaaatgtccagccacccctaggcatctgttagcagagtctgtctcttggctttgtcacttttccttttcttaaaacaaagccatgccaataaagtgacctgtgttcaaaa

SEQ ID NO: 56 - DNA, 1805 bp, Homo sapiens
gcagatggtgctgtcgaccagtgtcaagaccaagtttcatgggttcctggacgctcagccaggggtagtctctgaagggccgcctggcaattgggagcagaagccagtttcccgccatctgctctccgtggaggcagtgctctcgcggctgctgcccgttggggtccagctgaggaaggagcgcggatcccaggctcgttctttgcctgggctgcccctgcggcccctggggcgggtgctgctgcggcgccagctccaagggcggatccaggcgggaggggcctcctcggagaagcggggcgcggtcccaactacgcagaggctggcacgccgaccctccacacctcaccacgcccccatctccgtccgtgtacacacactcacacaaggacgccaaccccacctagatgcaaagcaggattcaaaagaacatctttgcgttttctaccggctccccatcatcgtactagggaggaagaagcgggtgagaaacaaaacttctttccattgtcctgcccgtttctgcggacttgttctgaggccgaggcacctctaagatactgatggctctgcagaggacccattcattgcttctgcttttgctgctgaccctgctggggctggggctggtccagccctcctatggccaggatggcatgtaccagcgattcctgcggcaacacgtgcaccctgaggagacaggtggcagtgatcgctactgcaacttgatgatgcaaagacggaagatgactttgtatcactgcaagcgcttcaacaccttcatccatgaagatatctggaacattcgtagtatctgcagcaccaccaatatccaatgcaagaacggcaagatgaactgccatgagggtgtagtgaaggtcacagattgcagggacacaggaagttccagggcacccaactgcagatatcgggccatagcgagcactagacgtgttgtcattgcctgtgagggtaacccacaggtgcctgtgcactttgacggttagatgccaccatgtagggattatcgcgagtggttgaccttacacttactccttaaatagcagtgagtaatgcatttgagctgtcccaggctctgtctcctcagctcatttcctactctttttctctatataactcattctattaaatacattgcaccaaagagatatggagacataaacctgtaatgaatgaggctgggcttttctgtaataagcttccttttataatactggtcagcttagctctctcagatcctatcctgtggaatttagttattatgtgtatttatgtagtatttcaaacatttcaaaatgctttcatctatgtttatcacattttaataccacagcacttataatgatgtcactacatatagaagctcaaagttaagggatttgctgaagactgtaaagttaatggaagaattgagacaaaaatccagtgtagctggccacttatccagggctttttctacttcatcacaaggaatgttttgaaagtgtctgctttttttatccttaaaattcacctgtcagggaggcattaaaaatttggaaatgtatgccagcaaaatgtgagctctgtattttttggcattcttatgtttgggtttaataagattaagaaaatgatactgggaattttctttttcctgaaactttgaatcaccctagtaagtcaaagtactaaaaaatgtactagatcattaagacttatgtgctcttactgattgaaagattttttatgttttccttgtaataaaggacctaaaccgaaggtacctgaaaaaaaaaaaaaaa

SEQ ID NO: 57 - DNA, 2000 bp, Homo sapiens
attttcctggggctccggggcgcggagaagctgcatcccagaggagcgcgtccaggagcggacccgggagtgtttcaagagccagtgacaaggaccaggggcccaagtcccaccagccatgcagacctgccccctggcattccctggccacgtttcccaggcccttgggaccctcctgtttttggctgcctccttgagtgctcagaatgaaggctgggacagccccatctgcacagagggggtagtctctgtgtcttggggcgagaacaccgtcatgtcctgcaacatctccaacgccttctcccatgtcaacatcaagctgcgtgcccacgggcaggagagcgccatcttcaatgaggtggctccaggctacttctcccgggacggctggcagctccaggttcagggaggcgtggcacagctggtgatcaaaggcgcccgggactcccatgctgggctgtacatgtggcacctcgtgggacaccagagaaataacagacaagtcacgctggaggtttcaggtgcagaaccccagtccgcccctgacactgggttctggcctgtgccagcggtggtcactgctgtcttcatcctcttggtcgctctggtcatgttcgcctggtacaggtgccgctgttcccagcaacgccgggagaagaagttcttcctcctagaaccccagatgaaggtcgcagccctcagagcgggagcccagcagggcctgagcagagcctccgctgaactgtggaccccagactccgagcccaccccaaggccgctggcactggtgttcaaaccctcaccacttggagccctggagctgctgtccccccaacccttgtttccatatgccgcagacccatagccgcctgcaaggcagagaggacacaggagagccagccctgagtgccgaccttgggtggcggggcctgggtctctcgtcccacccggagggcacagacaccggcttgcttggcaggctgggcctctgtgtcacccactcctgggtgcgtgcagacccttcccctccaccccccaggtcttccaagctctgcttcctcagtttccaaaatggaaccacctcacctccgcagcacccgacttaccaggacgcatgcccctccctctgccctcatcaaacccacagacccggactccctttctgccaccccaggctggtccggccccaggtgtggggtccgctctctccactcccagggctccgcgcccaagtgagggggcccctgccggagcctcagacacactggagttcagggctgggggggccttggcacatacctgtcccttggctatgagcaggctttgggggcccttccgcggcagccccgggggccgaggtagggtctgggggcttagaggctgggatggctcctggccccaccgccagggggcaagcgcaggccgggctgggaggcggcggcggcggctcgggctggggggtcaggtggacgctgcctccggggctggtcgcgcatccctcagtccctcggccacccgggggtcgctccctcgtgcccaccgcacctgccgagcctctttggacccagatctgttcatgcttttgtcttcgtcactgcggcggggccctttgatgtcttcatctgtatggggtggaaaaatcaccgggaatcccccttcagttctttgaaaaagttccatgactcgaatatctgaaatgaagaaaacaaaccgactcacaaacctccaagtagctccaaatgcaatttttaaaatggaaaacaaaaatctgaaagaaacgtctttagtggctttaagccccaaaacgtccctaaggcgtcctcgagatgaagacgggggggagcccccagccaggtggagaccccgcaggacgcggcggcgcccggtgaccgaggcctcgcacagccggccgccctgagggtcgggccggagccagggtccaagaggggcgcgtttgtgtctcgggttaaaataaggttccgtccgcgtgctgggtcaga

SEQ ID NO: 58 - DNA, 4465 bp, Homo sapiens
cctgcagcctccggagtcagtgccgcgcgcccgccgccccgcgccttcctgctcgccgcacctccgggagccggggcgcacccagcccgcagcgccgcctccccgcccgcgccgcctccgaccgcaggccgagggccgccactggccggggggaccgggcagcagcttgcggccgcggagccgggcaacgctggggactgcgccttttgtccccggaggtccctggaagtttgcggcaggacgcgcgcggggaggcggcggaggcagccccgacgtcgcggagaacagggcgcagagccggcatgggcatcgggcgcagcgaggggggccgccgcggggcagccctgggcgtgctgctggcgctgggcgcggcgcttctggccgtgggctcggccagcgagtacgactacgtgagcttccagtcggacatcggcccgtaccagagcgggcgcttctacaccaagccacctcagtgcgtggacatccccgcggacctgcggctgtgccacaacgtgggctacaagaagatggtgctgcccaacctgctggagcacgagaccatggcggaggtgaagcagcaggccagcagctgggtgcccctgctcaacaagaactgccacgccggcacccaggtcttcctctgctcgctcttcgcgcccgtctgcctggaccggcccatctacccgtgtcgctggctctgcgaggccgtgcgcgactcgtgcgagccggtcatgcagttcttcggcttctactggcccgagatgcttaagtgtgacaagttccccgagggggacgtctgcatcgccatgacgccgcccaatgccaccgaagcctccaagccccaaggcacaacggtgtgtcctccctgtgacaacgagttgaaatctgaggccatcattgaacatctctgtgccagcgagtttgcactgaggatgaaaataaaagaagtgaaaaaagaaaatggcgacaagaagattgtccccaagaagaagaagcccctgaagttggggcccatcaagaagaaggacctgaagaagcttgtgctgtacctgaagaatggggctgactgtccctgccaccagctggacaacctcagccaccacttcctcatcatgggccgcaaggtgaagagccagtacttgctgacggccatccacaagtgggacaagaaaaacaaggagttcaaaaacttcatgaagaaaatgaaaaaccatgagtgccccacctttcagtccgtgtttaagtgattctcccgggggcagggtggggagggagcctcgggtggggtgggagcgggggggacagtgccccgggaacccggtgggtcacacacacgcactgcgcctgtcagtagtggacattgtaatccagtcggcttgttcttgcagcattcccgctcccttccctccatagccacgctccaaaccccagggtagccatggccgggtaaagcaagggccatttagattaggaaggtttttaagatccgcaatgtggagcagcagccactgcacaggaggaggtgacaaaccatttccaacagcaacacagccactaaaacacaaaaagggggattgggcggaaagtgagagccagcagcaaaaactacattttgcaacttgttggtgtggatctattggctgatctatgcctttcaactagaaaattctaatgattggcaagtcacgttgttttcaggtccagagtagtttctttctgtctgctttaaatggaaacagactcataccacacttacaattaaggtcaagcccagaaagtgataagtgcagggaggaaaagtgcaagtccattatgtaatagtgacagcaaagggaccaggggagaggcattgccttctctgcccacagtctttccgtgtgattgtctttgaatctgaatcagccagtctcagatgccccaaagtttcggttcctatgagcccggggcatgatctgatccccaagacatgtggaggggcagcctgtgcctgcctttgtgtcagaaaaaggaaaccacagtgagcctgagagagacggcgattttcgggctgagaaggcagtagttttcaaaacacatagttaaaaaagaaacaaatgaaaaaaattttagaacagtccagcaaattgctagtcagggtgaattgtgaaattgggtgaagagcttaggattctaatctcatgttttttccttttcacatttttaaaagaacaatgacaaacacccacttatttttcaaggttttaaaacagtctacattgagcatttgaaaggtgtgctagaacaaggtctcctgatccgtccgaggctgcttcccagaggagcagctctccccaggcatttgccaagggaggcggatttccctggtagtgtagctgtgtggctttccttcctgaagagtccgtggttgccctagaacctaacaccccctagcaaaactcacagagctttccgtttttttctttcctgtaaagaaacatttcctttgaacttgattgcctatggatcaaagaaattcagaacagcctgcctgtccccccgcactttttacatatatttgtttcatttctgcagatggaaagttgacatgggtggggtgtccccatccagcgagagagtttcaaaagcaaaacatctctgcagtttttcccaagtaccctgagatacttcccaaagcccttatgtttaatcagcgatgtatataagccagttcacttagacaactttacccttcttgtccaatgtacaggaagtagttctaaaaaaaatgcatattaatttcttcccccaaagccggattcttaattctctgcaacactttgaggacatttatgattgtccctctgggccaatgcttatacccagtgaggatgctgcagtgaggctgtaaagtggccccctgcggccctagcctgacccggaggaaaggatggtagattctgttaactcttgaagactccagtatgaaaatcagcatgcccgcctagttacctaccggagagttatcctgataaattaacctctcacagttagtgatcctgtccttttaacaccttttttgtggggttctctctgacctttcatcgtaaagtgctggggaccttaagtgatttgcctgtaattttggatgattaaaaaatgtgtatatatattagctaattagaaatattctacttctctgttgtcaaactgaaattcagagcaagttcctgagtgcgtggatctgggtcttagttctggttgattcactcaagagttcagtgctcatacgtatctgctcattttgacaaagtgcctcatgcaaccgggccctctctctgcggcagagtccttagtggaggggtttacctggaacattagtagttaccacagaatacggaagagcaggtgactgtgctgtgcagctctctaaatgggaattctcaggtaggaagcaacagcttcagaaagagctcaaaataaattggaaatgtgaatcgcagctgtgggttttaccaccgtctgtctcagagtcccaggaccttgagtgtcattagttactttattgaaggttttagacccatagcagctttgtctctgtcacatcagcaatttcagaaccaaaagggaggctctctgtaggcacagagctgcactatcacgagcctttgtttttctccacaaagtatctaacaaaaccaatgtgcagactgattggcctggtcattggtctccgagagaggaggtttgcctgtgatttcctaattatcgctagggccaaggtgggatttgtaaagctttacaataatcattctggatagagtcctgggaggtccttggcagaactcagttaaatctttgaagaatatttgtagttatcttagaagatagcatgggaggtgaggattccaaaaacattttatttttaaaatatcctgtgtaacacttggctcttggtacctgtgggttagcatcaagttctccccagggtagaattcaatcagagctccagtttgcatttggatgtgtaaattacagtaatcccatttcccaaacctaaaatctgtttttctcatcagactctgagtaactggttgctgtgtcataacttcatagatgcaggaggctcaggtgatctgtttgaggagagcaccctaggcagcctgcagggaataacatactggccgttctgacctgttgccagcagatacacaggacatggatgaaattcccgtttcctctagtttcttcctgtagtactcctcttttagatcctaagtctcttacaaaagctttgaatactgtgaaaatgttttacattccatttcatttgtgttgtttttttaactgcattttaccagatgttttgatgttatcgcttatgttaatagtaattcccgtacgtgttcattttattttcatgctttttcagccatgtatcaatattcacttgactaaaatcactcaattaatcaatgaaaaaaaaaaa

SEQ ID NO: 59 - DNA, 2820 bp, Homo sapiens
ggcgggttcgcgccccgaaggctgagagctggcgctgctcgtgccctgtgtgccagacggcggagctccgcggccggaccccgcggccccgctttgctgccgactggagtttgggggaagaaactctcctgcgccccagaagatttcttcctcggcgaagggacagcgaaagatgagggtggcaggaagagaaggcgctttctgtctgccggggtcgcagcgcgagagggcagtgccatgttcctctccatcctagtggcgctgtgcctgtggctgcacctggcgctgggcgtgcgcggcgcgccctgcgaggcggtgcgcatccctatgtgccggcacatgccctggaacatcacgcggatgcccaaccacctgcaccacagcacgcaggagaacgccatcctggccatcgagcagtacgaggagctggtggacgtgaactgcagcgccgtgctgcgcttcttcttctgtgccatgtacgcgcccatttgcaccctggagttcctgcacgaccctatcaagccgtgcaagtcggtgtgccaacgcgcgcgcgacgactgcgagcccctcatgaagatgtacaaccacagctggcccgaaagcctggcctgcgacgagctgcctgtctatgaccgtggcgtgtgcatttcgcctgaagccatcgtcacggacctcccggaggatgttaagtggatagacatcacaccagacatgatggtacaggaaaggcctcttgatgttgactgtaaacgcctaagccccgatcggtgcaagtgtaaaaaggtgaagccaactttggcaacgtatctcagcaaaaactacagctatgttattcatgccaaaataaaagctgtgcagaggagtggctgcaatgaggtcacaacggtggtggatgtaaaagagatcttcaagtcctcatcacccatccctcgaactcaagtcccgctcattacaaattcttcttgccagtgtccacacatcctgccccatcaagatgttctcatcatgtgttacgagtggcgttcaaggatgatgcttcttgaaaattgcttagttgaaaaatggagagatcagcttagtaaaagatccatacagtgggaagagaggctgcaggaacagcggagaacagttcaggacaagaagaaaacagccgggcgcaccagtcgtagtaatccccccaaaccaaagggaaagcctcctgctcccaaaccagccagtcccaagaagaacattaaaactaggagtgcccagaagagaacaaacccgaaaagagtgtgagctaactagtttccaaagcggagacttccgacttccttacaggatgaggctgggcattgcctgggacagcctatgtaaggccatgtgccccttgccctaacaactcactgcagtgctcttcatagacacatcttgcagcatttttcttaaggctatgcttcagtttttctttgtaagccatcacaagccatagtggtaggtttgccctttggtacagaaggtgagttaaagctggtggaaaaggcttattgcattgcattcagagtaacctgtgtgcatactctagaagagtagggaaaataatgcttgttacaattcgacctaatatgtgcattgtaaaataaatgccatatttcaaacaaaacacgtaatttttttacagtatgttttattaccttttgatatctgttgttgcaatgttagtgatgttttaaaatgtgatgaaaatataatgtttttaagaaggaacagtagtggaatgaatgttaaaagatctttatgtgtttatggtctgcagaaggatttttgtgatgaaaggggattttttgaaaaattagagaagtagcatatggaaaattataatgtgtttttttaccaatgacttcagtttctgtttttagctagaaacttaaaaacaaaaataataataaagaaaaataaataaaaaggagaggcagacaatgtctggattcctgttttttggttacctgatttccatgatcatgatgcttcttgtcaacaccctcttaagcagcaccagaaacagtgagtttgtctgtaccattaggagttaggtactaattagttggctaatgctcaagtattttatacccacaagagaggtatgtcactcatcttacttcccaggacatccaccctgagaataatttgacaagcttaaaaatggccttcatgtgagtgccaaattttgtttttcttcatttaaatattttctttgcctaaatacatgtgagaggagttaaatataaatgtacagagaggaaagttgagttccacctctgaaatgagaattacttgacagttgggatactttaatcagaaaaaaagaacttatttgcagcattttatcaacaaatttcataattgtggacaattggaggcatttattttaaaaaacaattttattggccttttgctaacacagtaagcatgtattttataaggcattcaataaatgcacaacgcccaaaggaaataaaatcctatctaatcctactctccactacacagaggtaatcactattagtattttggcatattattctccaggtgtttgcttatgcacttataaaatgatttgaacaaataaaactaggaacctgtatacatgtgtttcataacctgcctcctttgcttggccctttattgagataagttttcctgtcaagaaagcagaaaccatctcatttctaacagctgtgttatattccatagtatgcattactcaacaaactgttgtgctattggatacttaggtggtttcttcactgacaatactgaataaacatctcaccggaattc

SEQ ID NO: 60 - DNA, 7561 bp, Homo sapiens
gtgagctgaagcagggcagggcatcaactcacccaggaagtgcaaggggtttggggattttcctttcctagccaagggaaggcatgacagactgtacctggaaaaacaggacactcttgcccaaatactgcactttttgcacagtcttagcaactggcagaccaggagattctctcctgtgcctgattcattgggtcccacacccatagggccttgcttactgccagtgcagcagtctgagattaacaccccatccccgggagaactctaagaaggagctgatgtggaggagcagctgagacagttcaagatgacgaccacagtagccacagactatgacaacattgagatccagcagcagtacagtgatgtcaacaaccgctgggatgtcgacgactgggacaatgagaacagctctgcgcggctttttgagcggtcccgcatcaaggctctggcagatgagcgtgaagccgtgcagaagaagaccttcaccaagtgggtcaattcccaccttgcccgtgtgtcctgccggatcacagacctgtacactgaccttcgagatggacggatgctcatcaagctgctggaggtcctctctggagagaggctgcctaaacccaccaagggacgaatgcgcatccactgcttagagaatgtggacaaggcccttcagttcctgaaggagcagagagtccatcttgagaacatggggtcccatgacatcgtggatggaaaccaccggctgacccttggcctcatctggaccatcatcctgcgcttccagatccaggatatcagtgtggaaactgaagacaacaaagagaagaaatctgccaaggatgcattgctgttgtggtgccagatgaagacagctgggtaccccaatgtcaacattcacaatttcaccactagctggagggacggcatggccttcaatgcactgatacacaaacaccggcctgacctgatagattttgacaaactaaagaaatctaacgcacactacaacctgcagaatgcatttaatctggcagaacagcacctcggcctcactaaactgttggaccccgaagacatcagcgtggaccatcctgatgagaagtccataatcacttatgtggtgacttattaccactacttctctaagatgaaggccttagctgttgaaggaaaacgaattggaaaggtgcttgacaatgctattgaaacagaaaaaatgattgaaaagtatgaatcacttgcctctgaccttctggaatggattgaacaaaccatcatcattctgaacaatcgcaaatttgccaattcactggtcggggttcaacagcagcttcaggcattcaacacttaccgcactgtggagaaaccacccaaatttactgagaaggggaacttggaagtgctgctcttcaccattcagagcaagatgagggccaacaaccagaaggtctacatgccccgggaggggaagctcatctctgacatcaacaaggcctgggaaagactggaaaaagcggaacacgaaagagaactggctttgcggaatgagctcataagacaggagaaactggaacagctcgcccgcagatttgatcgcaaggcagctatgagggagacttggctgagcgaaaaccagcgtctggtgtctcaggacaactttgggtttgaccttcctgcagttgaggccgccacaaaaaagcacgaggccattgagacagacattgccgcatacgaggagcgtgtgcaggctgtggtagccgtggccagggagctcgaggccgagaattaccacgacatcaagcgcatcacagcgaggaaggacaatgtcatccggctctgggaatacctactggaactgctcagggcccggagacagcggctcgagatgaacctggggctgcagaagatattccaggaaatgctctacattatggactggatggatgaaatgaaggtgctagtattgtctcaagactatggcaaacacttacttggtgtggaagacctgttacagaagcacaccctggttgaagcagacattggcatccaggcagagcgggtgagaggtgtcaatgcctccgcccagaagttcgcaacagacggggaaggttacaagccctgtgacccccaggtgatccgagaccgcgtggcccacatggagttctgttatcaagagctttgccagctggcggctgagcgcagggcccgtctggaagagtcccgccgcctctggaagttcttctgggagatggcagaagaggaaggctggatacgggagaaggagaagatcctgtcctcggacgattacgggaaagacctgaccagcgtcatgcgcctgctcagcaagcaccgggcgttcgaggacgagatgagcggccgcagtggccactttgagcaggccatcaaggaaggcgaagacatgatcgcggaggagcacttcgggtcggagaagatccgtgagaggatcatttacatccgggagcagtgggccaacctagagcagctctcggccattcggaagaagcgcctggaggaggcctccctgctgcaccagttccaggcagatgctgatgacattgatgcctggatgctggacatcctcaagattgtctccagcagcgacgtgggccacgatgagtattccacacagtctctggtcaagaaacacaaggacgtggcggaagagatcgccaattacaggcccacccttgacacgctgcacgaacaagccagcgccctcccccaggagcatgccgagtctccagacgtgaggggcaggctgtcgggcatcgaggagcggtataaggaggtggcagagctgacgcggctgcggaagcaggcactccaggacactctggccctgtacaagatgttcagcgaggctgatgcctgtgagctctggatcgacgagaaggagcagtggctcaacaacatgcagatcccagagaagctggaggatctggaggtcatccagcacagatttgagagcctagaaccagaaatgaacaaccaggcttcccgggttgcagtggtgaaccagattgcacgccagctgatgcacagcggccacccaagtgagaaggaaatcaaagcccagcaggacaaactcaacacaaggtggagccagttcagagaactggttgacaggaagaaggatgccctcctgtctgccctgagcatccagaactaccacctcgagtgcaatgaaaccaaatcctggattcgggaaaagaccaaggtcatcgagtccacccaggacctgggcaatgacctggctggcgtcatggccctgcagcgcaagctgaccggcatggagcgggacttggtggccattgaggcaaagctgagtgacctgcagaaggaggcggagaagctggagtccgagcaccccgaccaggcccaggccatcctgtctcggctggccgagatcagcgacgtgtgggaggagatgaagaccaccctgaaaaaccgagaggcctccctgggagaggccagcaagctgcagcagttcctacgggacttggacgacttccagtcctggctctctaggacccagacagcgatcgcctcggaggacatgccaaacaccctgaccgaggctgagaagctgctcacgcagcacgagaacatcaagaatgagatcgacaactacgaggaggactaccagaagatgagggacatgggcgagatggtcacccaggggcagaccgatgcccagtacatgtttctgcggcagcggctgcaggccctggacactggatggaacgagctccacaagatgtgggagaacagacaaaatctcctatcccagtcacatgcctaccagcagttcctcagagacacgaagcaagccgaagcctttcttaacaaccaggagtatgttctggctcacactgaaatgcctaccaccttggaaggagctgaagcagcaattaaaaagcaagaggacttcatgaccaccatggacgccaatgaggagaagatcaatgctgtggtggagactggccggaggctggtgagcgatgggaacatcaactcagatcgcatccaggagaaggtggactctattgatgacagacataggaagaatcgtgagacagccagtgaacttttgatgaggttgaaggacaacagggatctacagaaattcctgcaagattgtcaagagctgtctctctggatcaatgagaagatgctcacagcccaggacatgtcttacgatgaagccagaaatctgcacagtaaatggttgaagcatcaagcatttatggcagaacttgcatccaacaaagaatggcttgacaaaatcgagaaggaaggaatgcagctcatttcagaaaagcctgagacggaagctgtggtgaaggagaaactcactggtttacataaaatgtgggaagtccttgaatccactacccagacaaaggcccagcggctctttgatgcaaacaaggccgaacttttcacccagagctgtgcagatctagacaaatggctgcacggcctggagagtcagattcagtctgatgactatggcaaacacctgaccagtgtcaatatcctgctgaaaaagcaacagatgctggagaatcagatggaagtgcggaagaaggagatcgaagagctccaaagccaagcccaggccctgagtcaggaagggaagagcaccgacgaggtagacagcaagcgcctcaccgtgcagaccaagttcatggagttgctggagcccttgaacgagaggaagcataacctgctggcctccaaagagatccatcagttcaacagggatgtggaggacgagatcttgtgggttggagagaggatgcctttggcaacttccacggatcatggccacaacctccagactgtgcagctgttaataaagaaaaatcagaccctccagaaagaaatccaggggcaccagcctcgcattgacgacatctttgagaggagccaaaacatcgtcactgacagcagcagcctcagcgctgaggccatcagacagaggcttgccgacctgaagcagctgtggggtctcctcattgaggagacagagaaacgccacaggcggctggaggaggcgcacagggcccagcagtactactttgacgctgctgaggccgaagcctggatgagcgagcaggagctgtacatgatgtcagaggagaaggccaaggatgagcagagtgctgtctccatgttgaagaagcaccagatcttagaacaagctgtggaggactatgcagagaccgtgcatcagctctccaagaccagccgggccctggtggccgacagccatcctgaaagtgagcgcattagcatgcggcagtccaaagtggataaactgtacgctggtctgaaagaccttgctgaagagagaagaggcaagctggatgagagacacaggttattccagctcaaccgggaggtggacgacctggagcagtggatcgctgagagggaggtggtcgcagggtcccatgaactgggacaggactatgagcatgtcacgatgttacaagaacgattccgggagtttgcccgagacaccgggaacattgggcaggagcgcgtggacacggtcaatcacctggcagatgagctcatcaactctggacattcagatgccgccaccatcgctgaatggaaggatggcctcaatgaagcctgggccgacctcctggagctcattgacacaagaacacagattcttgccgcttcctatgaactgcacaagttttaccacgatgccaaggagatctttgggcgtatacaggacaaacacaagaaactccctgaggagcttgggagagatcagaacacagtggagaccttacagagaatgcacactacatttgagcatgacatccaggctctgggcacacaggtgaggcagctgcaggaggatgcagcccgcctccaggcggcctatgcgggtgacaaggccgacgatatccagaagcgcgagaacgaggtcctggaagcctggaagtccctcctggacgcctgtgagagccgcagggtgcggctggtggacacaggggacaagttccgcttcttcagcatggtgcgcgacctcatgctctggatggaggatgtcatccggcagatcgaggcccaggagaagccaagggatgtatcatctgttgaactcttaatgaataatcatcaaggcatcaaagctgaaattgatgcacgtaatgacagtttcacaacctgcattgaacttgggaaatccctgttggcgagaaaacactatgcatctgaggagatcaaggaaaaattactgcagttgacggaaaagaggaaagaaatgatcgacaagtgggaagaccgatgggaatggttaagactgattctggaggtccatcagttctcaagagacgccagtgtggccgaggcctggctgcttggacaggagccgtacctatccagccgagagataggccagagcgtggacgaggtggagaagctcatcaagcgccacgaggcatttgaaaagtctgcagcaacctgggatgagaggttctctgccctggaaaggctgactacattggagttactggaagtgcgcagacagcaagaggaagaggagaggaagaggcggccgccttctcccgagccgagcacgaaggtttcagaggaagccgagtcccagcagcagtgggatacttcaaaaggagaacaagtttcccaaaacggtttgccagctgaacagggatctccacggatggcagaaacggtggacacaagcgaaatggtcaacggcgctacagaacaaaggacgagctctaaagagtccagccccatcccctccccgacctctgatcgtaaagccaagactgccctcccagcccagagtgccgccaccttaccagccagaacccaggagacaccttcggcccagatggaaggcttcctcaatcggaaacacgagtgggaggcccacaataagaaagcctcaagcaggtcctggcacaatgtttattgtgtcataaataaccaagaaatgggtttctacaaagatgcaaagactgctgcttctggaattccctaccacagcgaggtccctgtgagtttgaaagaagctgtctgcgaagtggcccttgattacaaaaagaagaaacacgtattcaagctaagactaaatgatggcaatgagtacctcttccaagccaaagacgatgaggaaatgaacacatggatccaggctatctcttccgccatctcctctgataaacacgaggtgtctgccagcacccagagcacgccagcatccagccgcgcgcagaccctccccaccagcgtcgtcaccatcaccagcgagtccagtcccggcaagcgggaaaaggacaaagagaaagacaaagagaagcggttcagcctttttggcaaaaagaaatgaactcctttccttcacctcctgcccttctcttaccttttcagtgaaattccagcatgcaagctcagaaccaacacattactctctgtgcctaatgttcctcaatgtggttgatttatttttttttttaatttatagagcatttcggggggggtgggg

SEQ ID NO: 61 - DNA, 1636 bp, Homo sapiens
gaattccggctctctgggtgagagaccgagaggggcatatccgttcacgccgatccatgaaaatgctttggaaattgacggataatatcaagtacgaggactgcgaggaccgtcacgacggcaccagcaacgggacggcacggttgccccagctgggcactgtaggtcaatctccctacacgagcgccccgccgctgtcccacacccccaatgccgacttccagcccccatacttccccccaccctaccagcctatctacccccagtcgcaagatccttactcccacgtcaacgacccctacagcctgaaccccctgcacgcccagccgcagccgcagcacccaggctggcccggccagaggcagagccaggagtctgggctcctgcacacgcaccgggggctgcctcaccagctgtcgggcctggatcctcgcagggactacaggcggcacgaggacctcctgcacggcccacacgcgctcagctcaggactcggagacctctcgatccactccttacctcacgccatcgaggaggtcccgcatgtagaagacccgggtattaacatcccagatcaaactgtaattaagaaaggccccgtgtccctgtccaagtccaacagcaatgccgtctccgccatccctattaacaaggacaacctcttcggcggcgtggtgaaccccaacgaagtcttctgttcagttccgggtcgcctctcgctcctcagctccacctcgaagtacaaggtcacggtggcggaagtgcagcggcggctctcaccacccgagtgtctcaacgcgtcgctgctgggcggagtgctccggagggcgaagtctaaaaatggaggaagatctttaagagaaaaactggacaaaataggattaaatctgcctgcagggagacgtaaagctgccaacgttaccctgctcacatcactagtagagggagaagctgtccacctagccagggactttgggtacgtgtgcgaaaccgaatttcctgccaaagcagtagctgaatttctcaaccgacaacattccgatcccaatgagcaagtgacaagaaaaaacatgctcctggctacaaaacagatatgcaaagagttcaccgacctgctggctcaggaccgatctcccctggggaactcacggcccaaccccatcctggagcccggcatccagagctgcttgacccacttcaacctcatctcccacggcttcggcagccccgcggtgtgtgccgcggtcacggccctgcagaactatctcaccgaggccctcaaggccatggacaaaatgtacctcagcaacaaccccaacagccacacggacaacaacgccaaaagcagtgacaaagaggagaagcacagaaagtgaggctctcctcccgccccgcccctcccacgcctcaccagccccccgcgcgcccaccctccggcgggtgacagctccgggatcagcaacccttcctgctgctgctactgctgctgctgctgccgccgccgccgccgccgctgcccttgggtccccccgagtctccgggactgccctctcgactgtcagtggggcagcctctccgactctgcacccgcctcgacctccccacccgctcccacacccctgtgcccccggaattc

SEQ ID NO: 62 - DNA, 1221 bp, Homo sapiens
gggtcctcggagctgctctggctgcgcgcggagcgggctccggagggaagtcccgagacaaagggaagcgccgccgccgccgccccgctcggtcctccacctgtccgctacgctcgccggggctgcggccgcccgagggactttgaacatgtcggggatcgccctcagcagactcgcccaggagaggaaagcatggaggaaagaccacccatttggtttcgtggctgtcccaacaaaaaatcccgatggcacgatgaacctcatgaactgggagtgcgccattccaggaaagaaagggactccgtgggaaggaggcttgtttaaactacggatgcttttcaaagatgattatccatcttcgccaccaaaatgtaaattcgaaccaccattatttcacccgaatgtgtacccttcggggacagtgtgcctgtccatcttagaggaggacaaggactggaggccagccatcacaatcaaacagatcctattaggaatacaggaacttctaaatgaaccaaatatccaagacccagctcaagcagaggcctacacgatttactgccaaaacagagtggagtacgagaaaagggtccgagcacaagccaagaagtttgcgccctcataagcagcgaccttgtggcatcgtcaaaaggaagggattggtttggcaagaacttgtttacaacatttttgcaaatctaaagttgctccatacaatgactagtcacctgggggggttgggcgggcgccatcttccattgccgccgcgggtgtgcggtctcgattcgctgaattgcccgtttccatacagggtctcttccttcggtcttttgtatttttgattgttatgtaaaactcgcttttattttaatattgatgtcagtatttcaactgctgtaaaattataaacttttatacttgggtaagtcccccaggggcgagttcctcgctctgggatgcaggcatgcttctcaccgtgcagagctgcacttggcctcagctggctgtatggaaatgcaccctccctcctgccgctcctctctagaaccttctagaacctgggctgtgctgcttttgagcctcagaccccaggtcagcatctcggttctgcgccacttcctttgtgtttatatggcgttttgtctgtgttgctgtttagagtaaataaactgtttatataaaggttttggttgcattattatcattgaaagtgagaggagg

SEQ ID NO: 63 - DNA, 2950 bp, Homo sapiens
gcggcccgtaggaaggtgctgtccgatcgatcgggataggagcggtccctgcgcttgctgctgggaagtggtacaatcatgtttgaaattaagaagatctgttgcatcggtgcaggctatgttggaggacccacatgtagtgtcattgctcatatgtgtcctgaaatcagggtaacggttgttgatgtcaatgaatcaagaatcaatgcgtggaattctcctacacttcctatttatgagccaggactaaaagaagtggtagaatcctgtcgaggaaaaaatctttttttttctaccaatattgatgatgccatcaaagaagctgatcttgtatttatttctgtgaatactccaacaaaaacctatggaatggggaaaggccgggcagcagatctgaagtatattgaagcttgtgctagacgcattgtgcaaaactcaaatgggtacaaaattgtgactgagaaaagcacagttccagtgcgggcagcagaaagtatccgtcgcatatttgatgcaaacacaaaacccaacttgaatttacaggtgctgtccaaccctgagtttctggcagagggaacagccatcaaggacctaaagaacccagacagagtactgattggaggggatgaaactccagagggccagagagctgtgcaggccctgtgtgctgtatatgagcactgggttcccagagaaaagatcctcaccactaatacttggtcttcagagctttccaaactggcagcaaatgcttttcttgcccagagaataagcagcattaactccataagtgctctgtgtgaagcaacaggagctgatgtagaagaggtagcaacagcgattggaatggaccagagaattggaaacaagtttctaaaagccagtgttgggtttggtgggagctgtttccaaaaggatgttctgaatttggtttatctctgtgaggctctgaatttgccagaagtagctcgttattggcagcaggtcatagacatgaatgactaccagaggaggaggtttgcttcccggatcatagatagtctgtttaatacagtaactgataagaagatagctattttgggatttgcattcaaaaaggacactggtgatacaagagaatcttctagtatatatattagcaaatatttgatggatgaaggtgcacatctacatatatatgatccaaaagtacctagggaacaaatagttgtggatctttctcatccaggtgtttcagaggatgaccaagtgtcccggctcgtgaccatttccaaggatccatatgaagcatgtgatggtgcccatgctgttgttatttgcactgagtgggacatgtttaaggaattggattatgaacgcattcataaaaaaatgctaaagccagcctttatcttcgatggacggcgtgtcctggatgggctccacaatgaactacaaaccattggcttccagattgaaacaattggcaaaaaggtgtcttcaaagagaattccatatgctccttctggtgaaattccgaagtttagtcttcaagatccacctaacaagaaacctaaagtgtagagattgccatttttatttgtgatttttttttttttttggtacttcaggatagcaaatatctatctgctattaaatggtaaatgaaccaagtgtttttttttgttttttttttgagacagagtctcactgttgcccaggctggagtgcagtggtgcaatctcggctcactgcaagctctgcttcccaggttcacgccattctcctggctcagcctcccaagtagctgggactacaggcacccgccacagtgcctgggctaattttttgtatttttagtagagacagggtttcaccatgtgagccaggatggtctcaatctcctgaccttgtgaaccacccgtctcggcctcccaaagtgctgggattacaggtgtgagccaccacgcctgggcccatgaaccaagtgtttttaaggaaacaaaactatttttttaatcatcagatttatactagctatatggatattagcatatctggtaattatgaatctagaatttttttacatatttttataatactgttagctcagttattggatgagtgaaagataatcatgttggttttaatagtgtcaatttttgtaaaataaaaattaaacttcaaactctttactttataaattgtccataggccacactttaatatcacattataaagggaaggacagtcttcattcctcctggttattggtttgtttgtcattaaagatatattttgaatccatgaaattgctatgctaaacagcctttacatgtatggtctggttaaagttcctttgttccttttgttttaataaaatgtgtcactgattttttagctcaaaatcatcactgttaatttccagtcaccccaaatatggttaaaagatttttttttttaatcatgaagagaaaattagtagcatttctttctctccccattatttattggttttcctcactaatctttttttttttagtccaaaagccaaaaatatttatcttggttttacattttaatttccattcttaattgtaatttttttctttaaataaggaaaccaatataatctcatgtataaaaacttaaatattttacaagttacatatagcatcattctaaaataagaattttttttgttttctgtctgcttttttcttatgtctcttgttgagttttatattttcagtggttatttttgcttgtgttagatcattattaaaatatatccaatgtccctttgatacttgtgctctgctgagaatgtacagtttgcattaaacatcccaggtctcatccttcaggaattttgcagttcaatgagaagagggagacaaatataaagatgaggacagaagcatctctacagatgaaaattacataaataaaacattctccatcaacaaaa

SEQ ID NO: 64 - DNA, 2545 bp, Homo sapiens
ccagcgtgctgaagccggagcgagctagccgcccggagccgcgccgacccagctgagcccagcccacgggacgccagacctcgaccgtcgctcctaccccggccaccgctcggagccgaggcggacgcgtcccgatcttcccctgtccccaccctgccccgaccctcctctccacctctcgcgtcgtgacaccagcgtctccggcagcctcttggtcatgaaagccctcagattgtcggcttccgccctcttctgccttctgctgatcaacgggttaggggcagcaccccctggtcgccctgaggcgcagcctcctcctctcagctctgagcataaagagccggtagccggggacgcagtgcccgggccaaaggatggcagcgccccagaggtccgaggcgctcggaattccgagccgcaggacgagggagagcttttccagggcgtggatccccgggcgctggccgcggtgctgctgcaggcactcgaccgtcccgcctcacccccggcaccaagcggctcccagcaggggccggaggaagaagcagctgaagctctgctgaccgagaccgtgcgcagccagacccacagcctcccggcgccggagagcccggagcccgcggctccgcctcgccctcagactccggagaatgggcccgaggcgagcgatccctccgaggagctcgaggcgctagcgtccctgctccaggaactgcgagatttcagtccaagtagcgccaagcgccagcaggagacggcggcagcagagacggaaacccgcacgcacacgctgacccgagtgaatctggagagcccggggccagagcgcgtatggcgcgcttcctggggagagttccaggcgcgtgtcccggagcgcgcgcccctgccgcccccggccccctctcaattccaggcgcgtatgcccgacagcgggccccttcccgaaacccacaagttcggggaaggagtgtcctcccccaaaacacacctaggcgaggcattggcacccctgtccaaggcgtaccaaggcgtggccgccccgttccccaaggcgcgccggccggagagcgcactcctgggcggctccgaggcgggcgagcgccttctccagcaagggctggcgcaggtggaggccgggcggcggcaggcggaggccacgcggcaggccgcggcgcaggaagagcggctggccgacctcgcctcggacctgctgctccagtatttgctgcagggcggggcccggcagcgcggcctcgggggtcgggggctgcaggaggcggcggaggagcgagagagtgcaagggaggaggaggaggcggagcaggagagacgcggcggggaggagagggtgggggaagaggatgaggaggcggccgaggcggaggcagaggcggaggaggcggagagggcgcggcagaacgcgctcctgttcgcggaggaggaggacggggaagccggcgccgaggacaagcgctcccaggaggagacgccgggccaccggcggaaggaggccgaggggacagaggagggcggggaggaggaggacgacgaggagatggatccgcagacgatcgacagcctcattgagctgtccaccaaactccacctgccagcggacgacgtggtcagcatcatcgaggaggtggaggagaagcggaagcggaagaagaacgcccctcccgagcccgtgccgcccccccgtgccgcccccgcccccacccacgtccgctccccgcagcccccgccccccgcccccgctcccgcacgagacgagctgccggactggaacgaggtgctcccgccctgggatcgggaggaggacgaggtgtacccgccagggccgtaccaccctttccccaactacatccggccgcggacactgcagccgccctcggccttgcgccgccgccactaccaccacgccttgccgccttcgcgccactatcccggccgggaggcccaggcgcggcgcgcgcaggaggaggcggaggcggaggagcgccggctgcaggagcaggaggagctggagaattacatcgagcacgtgctgctccggcgcccgtgactgcccttcccggtcccgcccccgcgcgcccccgccgcgcgcgcgcgccggcgcccccctccgtgttgcccgctccccctcggtgtttgcatgcgccccggccctgccccttggccctgcccctgtccccgggctgcgtcgggacctgccagacccccctcccgggtcctgagcccgaactcccagagctcacccgcgggtgaccgggggccagcccaggagggcgggtggtttgtgcgagttcccttgccacgcggggccccggccccatcaagtccctctggggacgtccccgtcggaaaccggaaaaagcagttccagttaattgtgtgaagtgtgtctgtctccagcccttcgggcctcccacgagcccctccagcctctccaagtcgctgtgaattgaccccttctttcctttctctgttgtaaatacccctcacggaggaaatagttttgctaagaaataaaagtgactatttt

SEQ ID NO: 65 - DNA, 4830 bp, Homo sapiens
caaccggttccgagtttgaggcactaggaggagggggagaagcggctgcagcggccgcggcaggagcagcgggagctacagcatcagcaagagcaacagtagctacagccccggcggcggtgcctgttccagtctttgctgctgcagtccgtgcaaccacccagagggggaggggggaaccaccagtcgctgaggaacaagagaaggggggaaagtttaggcgagccttgggggggggggggccagcgccggagccgcgtgagagagggagccgtgttttggtaggggggagtcggactgcaactggcagcagagcgtctccccggccgtgtggactctacaccccctactcctgccgcttctgctgctgcctgtggctggagggtccccctggggctgaatctttgggacttgaccccgttccctcccccttccctcactccccagccgggcgggagcatttattccccagattaattccccttttgggggggggcgggtgtgtgtgtgtgtgtgtgtgtgtgtgtgtgttgggggaagcgtccctgaaatagtaaatattattgagctctttttgcccttttcctgtccgtttttttaatttccttttttgaggtgggaaaactgaaacccaccttgattcgtcccctctcccccctccccaccttccctcgccctaatcccccaacgaggaaggaaggagcagttggttcaatctctggtaatctatgccagcaattatgacaatgttagcagaccatgcagctcgtcagctgcttgatttcagccaaaaactggatatcaacttattagataatgtggtgaattgcttataccatggagaaggagcccagcaaagaatggctcaagaagtactgacacatttaaaggagcatcctgatgcttggacaagagtcgacacaattttggaattttctcagaatatgaatacgaaatactatggactacaaattttggaaaatgtgataaaaacaaggtggaagattcttccaaggaaccagtgcgaaggaataaaaaaatacgttgttggcctcattatcaagacgtcatctgacccaacttgtgtagagaaagaaaaggtgtatatcggaaaattaaatatgatccttgttcagatactgaaacaagaatggcccaaacattggccaacttttatcagtgatattgttggagcaagtaggaccagcgaaagtctctgtcaaaataatatggtgattcttaaactcttgagtgaagaagtatttgatttctctagtggacagataacccaagtcaaatctaagcatttaaaagacagcatgtgcaatgaattctcacagatatttcaactgtgtcagtttgtaatggaaaattctcaaaatgctccacttgtacatgcaaccttggaaacattgctcagatttctgaactggattcccctgggatatatttttgagaccaaattaatcagcacattgatttataagttcctgaatgttccaatgtttcgaaatgtctctctgaagtgcctcactgagattgctggtgtgagtgtaagccaatatgaagaacaatttgtaacactatttactctgacaatgatgcaactaaagcagatgcttcctttaaataccaatattcgacttgcgtactcaaatggaaaagatgatgaacagaacttcattcaaaatctcagtttgtttctctgcacctttcttaaggaacatgatcaacttatagaaaaaagattaaatctcagggaaactcttatggaggcccttcattatatgttgttggtatctgaagtagaagaaactgaaatctttaaaatttgtcttgaatactggaatcatttggctgctgaactctatagagagagtccattctctacatctgcctctccgttgctttctggaagtcaacattttgatgttcctcccaggagacagctatatttgcccatgttattcaaggtccgtttattaatggttagtcgaatggctaaaccagaggaagtattggttgtagagaatgatcaaggagaagttgtgagagaattcatgaaggatacagattccataaatttgtataagaatatgagggaaacattggtttatcttactcatctggattatgtagatacagaaagaataatgacagagaagcttcacaatcaagtgaatggtacagagtggtcatggaaaaatttgaatacattgtgttgggcaataggctccattagtggagcaatgcatgaagaggacgaaaaacgatttcttgttactgttataaaggatctattaggattatgtgaacagaaaagaggcaaagataataaagctattattgcatcaaatatcatgtacatagtaggtcaatacccacgttttttgagagctcactggaaatttctgaagactgtagttaacaagctgttcgaattcatgcatgagacccatgatggagtccaggatatggcttgtgatactttcattaaaatagcccaaaaatgccgcaggcatttcgttcaggttcaggttggagaagtgatgccatttattgatgaaattttgaacaacattaacactattatttgtgatcttcagcctcaacaggttcatacgttttatgaagctgtggggtacatgattggtgcacaaacagatcaaacagtacaagaacacttgatagaaaagtacatgttactccctaatcaagtgtgggatagtataatccagcaggcaaccaaaaatgtggatatactgaaagatcctgaaacagtcaagcagcttggtagcattttgaaaacaaatgtgagagcctgcaaagctgttggacacccctttgtaattcagcttggaagaatttatttagatatgcttaatgtatacaagtgcctcagtgaaaatatttctgcagctatccaagctaatggtgaaatggttacaaagcaaccattgattagaagtatgcgaactgtaaaaagggaaactttaaagttaatatctggttgggtgagccgatccaatgatccacagatggtcgctgaaaattttgttccccctctgttggatgcagttctcattgattatcagagaaatgtcccagctgctagagaaccagaagtgcttagtactatggccataattgtcaacaagttagggggacatataacagctgaaatacctcaaatatttgatgctgtttttgaatgcacattgaatatgataaataaggactttgaagaatatcctgaacatagaacgaactttttcttactacttcaggctgtcaattctcattgtttcccagcattccttgctattccacctacacagtttaaacttgttttggattccatcatttgggctttcaaacatactatgaggaatgtcgcagatacgggcttacagatactttttacactcttacaaaatgttgcacaagaagaagctgcagctcagagtttttatcaaacttatttttgtgatattctccagcatatcttttctgttgtgacagacacttcacatactgctggtttaacaatgcatgcatcaattcttgcatatatgtttaatttggttgaagaaggaaaaataagtacatcattaaatcctggaaatccagttaacaaccaaatctttcttcaggaatatgtggctaatctccttaagtcggccttccctcacctacaagatgctcaagtaaagctctttgtgacagggcttttcagcttaaatcaagatattcctgctttcaaggaacatttaagagatttcctagttcaaataaaggaatttgcaggtgaagacacttctgatttgtttttggaagagagagaaatagccctacggcaggctgatgaagagaaacataaacgtcaaatgtctgtccctggcatctttaatccacatgagattccagaagaaatgtgtgattaaaatccaaattcatgctgttttttttctctgcaactcgttagcagaggaaaacagcatgtgggtatttgtcgaccaaaatgatgccaatttgtaaattaaaatgtcacctagtggccctttttcttatgtgtttttttgtataagaaattttctgtgaaatatccttccattgtttaagcttttgttttggtcatctttatttagtttgcatgaagttgaaaattaaggcatttttaaaaattttacttcatgcccatttttgtggctgggctggggggaggaggcaaattcgatttgaacatatacttgtaattctaatgcaaaattatacaatttttcctgtaaacaataccaatttttaattagggagcattttccttctagtctatttcagcctagaagaaaagataatgagtaaaacaaattgcgttgtttaaaggattatagtgctgcattgtctgaagttagcacctcttggactgaatcgtttgtctagactacatgtattacaaagtctctttggcaagattgcagcaagatcatgtgcatatcatcccattgtaaagcgacttcaaaaatatgggaacacagttagttatttttacacagttctttttgtttttgtgtgtgtgtgctgtcgcttgtcgacaacagctttttgttttcctcaatgaggagtgttgctcatttgtgagccttcattaactcgaagtgaaatggttaaaaatatttatcctgttagaataggctgcatctttttaacaactcattaaaaaacaaaacaactctggcttttgagatgacttatactaatttacattgtttaccaagctgtagtgctttaagaacactacttaaaaagcaaaataaacttggtttacattta

SEQ ID NO: 66 - DNA, 5217 bp, Homo sapiens
agcgcgcggagggcggggcctccccgggctcggccgcgccgccgcctcctccgcctcctcctcctcaccagcgctaaagccgggactggaccgagcggagttgtgcgtgtcgccgaaggggggtgggccgggggaggggaggttcgttccgcggagccgcagccagaaccgggaccaagaatcgccttcagccctgtctggtgcatccttggcagaaagtgaggaggaaaacacccccattgttagatgaggtcttaatcatggaacatttgaagtcacgtaaagaaggttctttggcatggacacaagttcagtgggaggattagaattgactgatcagactcctgttttattagggagtacggccatggcaactagtctcacgaatgtaggaaactcatttagtggtccagctaatcctttagtgtctagatctaataagtttcagaactcgtcagtggaagatgatgatgatgttgtttttatcgaacctgtacaacctcccccaccttctgtaccagtggtagctgatcaaagaaccataacatttacatcatcaaaaaatgaagaactacaaggaaatgattccaaaattactccttcctcaaaagagttggcatctcagaagggaagtgtaagtgagacaattgtcattgatgatgaagaggacatggaaacaaatcaagggcaagagaaaaattcctccaattttattgaacgaagacctcctgagactaaaaacagaaccaatgatgtggatttctccacttccagtttttcaagaagtaaggtaaatgcaggaatgggtaatagtggtatcaccacagaaccagactctgaaattcagattgctaatgttacaactttagaaacaggtgtaagctctgtgaatgatggccaattagaaaatactgacgggcgagatatgaacttaatgattacacatgtaacatcactgcagaataccaacttgggagatgtctctaacggactgcagtcaagtaattttggtgttaatatacaaacatacaccccatctttaacttcacagaccaagactggagtaggaccttttaatcctggtagaatgaatgtggcaggagacgtttttcagaatggagaatctgcaactcatcataatcctgattcttggatctcccagtcagcttcatttccccgtaatcagaaacaaccaggggtggactctttatcaccagtggcctcacttcctaaacagattttccagccgtctgtccaacagcagcctactaaaccagttaaagtcacttgtgcaaactgcaaaaaacctttacagaagggccagacagcttatcaacgaaaaggatcagctcacctcttttgttctaccacctgcctttcttccttctcccacaagcctgctccaaagaaactctgtgttatgtgtaaaaaagatataactacaatgaaaggaaccattgttgctcaagtggattcaagtgagtccttccaggaattctgtagtacatcttgtttatctctctatgaagacaaacagaatcctactaaaggagctctaaataaatcaagatgtacaatctgtggtaaactaactgagattcgccatgaagtcagctttaaaaatatgactcataagctgtgcagtgaccactgctttaatagatatagaatggccaatggtttaataatgaattgctgtgaacagtgtggagagtacttgcccagtaaaggtgctggaaataatgttctggtgattgatggtcaacagaaaagattttgctgtcaaagttgtgtcagtgaatacaaacaggtaggtagccatccaagcttcctgaaggaggttcgagatcacatgcaggactctttcttaatgcagcctgagaaatatggaaaactgacaacttgtactggttgccgaacacagtgcaggttttttgatatgactcagtgtataggtcctaatggatatatggagccatattgttcaactgcttgtatgaacagtcacaagacaaaatatgcaaaatcacaaagtttgggaattatttgccatttttgtaagcgaaactctttacctcaataccaagccacaatgcctgatggaaaactgtacaacttttgcaattccagttgtgtggctaaatttcaggctctaagtatgcagtcatctccaaatggccagtttgtagcgccaagtgatattcagttgaaatgcaactactgcaaaaattccttttgttcaaaaccagaaatcctggaatgggagaacaaagtgcatcagttctgcagcaaaacttgttcagatgactataagaagttgcattgcatagttacatattgcgaatactgtcaagaggagaagactcttcatgaaacagtaaatttctctggcgttaagagacctttctgtagtgaaggctgcaaattattatacaaacaggattttgccagacgtttaggattgagatgtgttacttgcaactattgttctcagctatgtaagaagggagcaactaaagaactcgatggtgttgtgagagatttctgcagtgaagattgctgtaaaaaatttcaggattggtactacaaggctgcaaggtgtgactgttgtaaatctcaaggaactcttaaagagcgagttcagtggcgtggggaaatgaaacatttctgtgatcaacattgcttactgcgtttctactgtcaacaaaatgagcccaacatgacaactcagaaaggacctgaaaacttacattatgatcagggttgtcagacatctcgaaccaaaatgacaggttcagcaccacccccttctccaacacctaacaaagagatgaagaacaaagcagttctttgcaaacctttaacaatgacaaaagctacttactgtaaacctcacatgcagaccaaatcttgtcagacagatgatacttggaggacagaatatgttccagtgcctatccctgtgcctgtgtatatcccagttcctatgcacatgtacagtcagaatattcctgttcctactacagttcctgttcctgtgccagttcctgtttttctgcctgctccattggacagcagtgagaagattcctgcagcaattgaggagctaaaaagcaaggtttcttcagatgctcttgatacagagttgcttacaatgacggatatgatgagtgaagacgaggggaaaacagagacaaccaacatcaacagtgtaattattgaaacagatataattggttcagaccttttgaagaactctgacccagagacacagtccagcatgcctgatgtaccatatgaaccagatttggatatcgaaatagattttcccagagctgctgaggagcttgatatggaaaatgaatttttattaccacctgtttttggcgaagaatatgaggaacagcccagacctcgatctaaaaaaaagggagccaagagaaaggctgtatcaggataccagtctcatgatgatagttctgacaattcagaatgcagctttcctttcaaatatacgtatggcgtaaatgcatggaaacactgggtcaaaactaggcaacttgatgaagatcttctggtattagatgagttaaaatcttctaaatcagtaaagttaaaagaggatctactctctcacaccacagctgagcttaactatgggttagctcattttgtcaatgagatccgacggccaaatggagagaattatgcacctgacagcatctattacctttgccttggaatacaggagtatttgtgtggaagtaatcgaaaagacaacatatttattgatcctggataccaaacatttgagcaagaattgaataaaatactgcgaagctggcaaccaagcatacttccagatgggtcaatattctctcgagttgaagaagactatctctggaggataaaacaactaggatcacactctccagtagctcttctgaatacactgttctactttaacactaagtattttggcctgaaaacagtggaacaacacttaagactttcctttggcactgtgtttaggcattggaaaaaaaatcctttaacgatggaaaacaaagcgtgtcttcgataccaagtgtcttccttgtgtggaacagataatgaagataaaattactactggaaaaagaaaacatgaagatgatgagccagtatttgaacaaattgaaaacacagccaatccttccagatgtcctgtgaaaatgtttgaatgctacttgtctaaaagtccacagaatcttaatcagaggatggatgttttttatttgcaaccagaatgctctagttctacagatagccctgtctggtatacgtctacttcactggaccgaaacaccttggaaaatatgcttgtacgggttcttctagtaaaagatatttatgataaagacaattatgaactggatgaagacacagactaaaaaggaacgttgcagaagcaatcgggataaaacagcattagatagtcatgctgctagatctttattatggaaaacatttcaagtttactccttctgttttgagttttgtagcagtgtacccacgctgggtattaccatgtaaataatctgtgagtgaaagttgccattattctatgtagtggttttaggatacttaacaaatacattcaaattctttttttattattatttatttgattaggtatgtttgtaactttttacattacagaatatgaatgagaatgtgccatgtataatttttttcttgtagtaagaaacatccatattgcacaactctactgttgcaaagcttccttggaagggggctcttttactgggttcttaaccagatggttgtgtatgggtagcactactaaaagtttagaacttgcagtgtctttcggaatttttaaaataaactgtaaactaataggctggggtttttgttttgttttggggttttgttttgtttggttttacattttagttactgaagccttacaaggttatgtagagagataccatcttctgtaccaaaaatagacaagagaatgctgtcaatattggtgtactgtaatgtgaatctatgctggtgaaaacaattttttgttccccttattaaaaccttagtgtccttttctcatttgtggctttctgcatcacccaatcaataaaaaacaaatatatatatgtatatatatgtatgtatgtgtgtgtgtatatatatatatatatatatatatata

SEQ ID NO: 67 - DNA, 4051 bp, Homo sapiens
gagggccgcgccggggcagagccgcgcgggcgggcgaggcgcgtgccggccgcaggagctccgggttgccgccgccgccgccgcccgcagcccacgtgcggccgctgctgcgcccgagctcacgccccgcggccgctttgttgctcccggccggcctgcacgatgcacacgccggacttcgcaggcccagacgacgcgcgcgcagttgacatcatggacatatgtgagtccatcctggagaggaagcggcatgacagcgaaaggtctacttgcagcatcttggagcagacagacatggaagctgtcgaggctcttgtttgtatgagctcctggggtcaaagatcccagaaaggtgacctgttgcggataagacccctcacgcctgtctctgactctggggatgtcaccaccactgtgcatatggatgcagccacacctgaactaccaaaagacttccattctttatcgactctgtgcataactcctcctcagagccctgatctcgtggagccatcgacaaggacacctgtttctccccaagtaacagattccaaagcatgtacagccacggatgttctccagtcctctgccgtagtggccagagctctgagcgggggcgcggagaggggcttgctgggtttggagccagtgcccagctctccctgcagggccaaggggactagcgtgatccgacacactggggagagccctgctgcctgctttcccaccatccagactccagattgccggctttctgacagcagagaaggagaagagcagcttctgggacactttgaaactttgcaggacacacacctcacggacagtttactcagcactaacttggtgtcctgtcagccctgcttgcacaagtctggtggcctgctgctcactgacaaaggccagcaggcagggtggcctggtgcagttcagacttgctcaccaaagaattatgaaaatgacctgcccaggaaaaccacccctctgatttctgtctctgtccctgctccccctgtcctttgccagatgatccctgtgactggacaaagtagcatgttaccagcttttttgaagccccctccccagttgtctgtggggactgtgagacccatcctagctcaggctgctccagcgcctcaacctgtgttcgtgggacctgctgtgcctcagggagctgtgatgttggtcctgccccagggagccctccctccgcctgccccctgtgcagccaatgtcatggctgccgggaataccaagttgttgccccttgcccctgctccagtgttcatcacctctagccaaaactgtgtccctcaggtagacttttcccgaaggaggaactatgtttgcagcttcccaggttgccggaagacctacttcaaaagttcccaccttaaggcccatcttcgcactcacacaggggagaagcctttcaactgcagctgggatggctgtgataaaaagtttgctcgttcggatgagctgtcacgccaccgcagaactcacacaggggagaagaagtttgtgtgcccggtgtgtgaccgacgtttcatgcgcagtgaccacctgacgaagcatgcccggcgccacatgacgaccaagaagatcccaggctggcaggcagaggttggcaagctgaacagaatcgcctctgcagagagcccggggagcccactggtgagcatgccagcctctgcctgaaaggtccattaggacatcactcatgggatttttaaaaagcctctttccaggaatggaactgatggattcctctcccactgcctcacccaaaaaaaacggtcttggcggcctaggggaagatcggggagctggttttgatgaaagtatgttaacttttcttttccacttgggaccctgttcagtatcttttgtagtttcagaagtttttttgttttggttttttttttaaagaaatggtagaaaatttgataatctgaatcaccagcattcaaacaaatatttcggcaataaagtttacaaaatctggatttttacaaccttttctattgatgttttgtagaaataagacagggtactaatttttatactggtttttagaaaaatatttatattgttggtgctcaaatcaccaatttctagctagatcattttgcagccttcttttcagtgtttaataacaaagtttttcctaatggcccttcttttagtaaactggacatgttattccactacaaaaaccacaagttatctggccttttagatctttttggaatcggacctggttgagtaaggacctcttaaaagggaaaaataaattttgccgtcagcttcttcataacgttttcaaggaaattctaggcaatcattcctgtcaccaaagaactaaaattttggttgactggaactagtgagctgtgtccatggtgtgtcatgaaggatgtaccccagagagtaacatgagccactgggcagatcccagggaccagtacttgctgcaggatctagtctgtaatagtcttggccatggctctgctgaaagcaagccattcagtttcttgtttgtacctaaaacaccaaaaaagaaacactcaaatccagctgctttgtcaattgtcagttctgactccttttgctgtggccttatccgtactatattgtgggtagagtaacttctcagaaaaaaaggaaatgtctgtattggttggatgaaactccaccagagcacagcttagctggggcgagatgcatgtgaaggcaggcagtgccaagattccgcttcctttgtttgccaaatactagaaacacaaggaaatgcaagttacgctaaatggcagtaatactacccaactgcctttctgttcattttgtttgaaggaaattgttttgaccaaacagaaaattacttggaatggtgtgttttacagtctacctagaaaatagatggacaatatttttcaactgtatgagcacgtagataaccgagagaatgtggccacctgtgttcaagaagccactgatactggtttttgttaaacattggaagttcaggcaatggaataaatgtaggaacatacagaatgttgcactaatttggtagcctgggaattttttttattgtgcagtatgtatttaaattttgtctatgttaattaccagcatttacctttatttaaatgatggtaaggtggaatattgaataaaattaggttttgtgttttgttctttgtagtctgataaaatctccacctggtcattcattgtgtgtgacttgatacctgttaacttgccccttagtatcagctgttacttgacacaaatgtgtgtgttattcagaggttttcagtctggacactccataggtgagtgtcgtgtcttcgtgagacagcacagttgtctcatgttgtgcatagttcatgtttcctcaccacccagtcctttctcctgctcatcaaaatcagcatacacatttttgactgtacacactataaatggcatcaaatttggatatttttcttaattatgacatgcaaagtaatgtgagtcctgccagtattctggtggataaggtcttttgagtatttggttgcttgtcacaacattctccaagcagtgatatttctaaagaggagatacatgttgaaaacggttttaatttacacttccatttcctgattacatttggaaatactttgtgtaaaccatcccccttccacctccatttgtctgttgaaagattttaagttggaaacagttcctgtctgaaaactcttctgagaaccacaaaccttgtgtatggattcggcatggagccctcagctggcggctctgggtgctgacggccgctggagaggtgggctcccctcgtgcactttattgcctgggcagttttgcttgatcttttgtgactttgagccttttaagtagtttgaatgataagacttaaaatgtttcataattatgttttatgtaacagactttgacattatttaaacgagcatgtgtaatgtaacttttctctttgaatcatataaaacttgattttacattgaaaaaaaaaaaaaaaaaaaaa

SEQ ID NO: 68 - DNA, 2624 bp, Homo sapiens
cccacgcgtccggatggtcctggtcacaaaatattaaagagaccgaccgctaagggaacaggaaaaacgtccgagacagccgttgcaattacgaatggaccagacttggtagcacggggcattgattgctggtgcccaaccggaccctcctcccctcttcccatcccttcccccacccaaagcaggctcccgctgcggccgggacctcgcatccctgcaacgtggccggggctgcatttttcatgagcctagggtgaacaggtgcgaagtgcgctgggagcatccggccagcggccgagcgcggggaacatggagagcgagcgcgacatgtaccgccagttccaggactggtgcctcaggacttacggggactcaggcaagaccaagacggtgacccgtaaaaaatacgaacggatcgtctagctcctcaatggctccgagtcgagctccacggacaacgccaaatttaaattctgggtcaaatcgaagggcttccagctgggccagccggacgaggtccgcgggggaggcggcggcgccaagcaagtgctctagtgcctgtcaagaccacggatggcgtaggggtagatgagaagctatctttacgacgggtagctgtggttgaagatttctttgacattatttattcgatgcatgtggaaacggggccaaatggagaacaaattcggaaacacgctggacaaaagagaacttacaaagcaatttcagagagctatgccttcctaccaagagaagcggtgacacgatttctaatgagctgctcagagtgccagaaaagaatgcatttaaacccagatggaacagatcataaagataatggaaaacctcccactttggtgaccagcatgattgactacaacatgccaattaccatggcctacatgaaacacatgaagctgcagctgctaaactcacagcaagatgaggatgaaagttcaatagaaagtgatgaatttgacatgagtgattcaacacggatgtcagctgtgaactctgatcttagctccaatcttgaagaaagaatgcaaagtccccagaatcttcatggccagcaagatgatgattctgctgcagagagctttaatggcaatgagactctggggcacagttcaattgcttcagggggaacacacagcagggagatgggagactccaacagtgatggcaaaactgggctggagcaagatgaacagccactgaacctgagtgacagtcccctctctgcgcagctaacttcggaatacagaatagatgatcacaacagtaatgggaaaaacaagtataagaatcttctaatttctgacctcaagatggaacgagaggcgagagaaaatggaagcaagtctcctgcacatagttactccagctatgactctggcaaaaatgagagtgtagaccgaggagctgaggacctctcactaaacaggggagatgaggacgaagatgaccacgaggaccatgacgattcggagaaagttaatgagacagacggcgttgaagccgagcggctgaaagcttttaatatgtttgtcaggctgtttgtagatgaaaacttggaccgaatggtcccaatctctaagcagcccaaagaaaagatccaggctatcattgactcatgcaggcgacaattccctgagtatcaagagcgtgccagaaaacgtatacgtacttacctcaagtcctgcaggcggatgaaaagaagtggttttgagatgtctcgacctattccttcccaccttacttcagcagttgcagagagtatcttggcttcagcttgtgagagtgagagtagaaatgccgccaagaggatgcgtctggagagacagcaggatgagtctgctccagctgacaaacagtgtaaaccagaggcgacccaggccacttactcaacatcagctgttccaggctcacaggacgtgctgtacatcaatggaaatgggacctatagttaccatagttacagagggctaggagggggtctgctaaatctgaatgatgcttccagcagtggacccactgatctcagcatgaagagacaattggcgactagctcaggatcctccagcagctcaaactccagaccccagctgagtccaactgaaatcaatgccgtgagacagcttgttgcaggatatcgagaatcagctgcatttttattgcgatctgcagatgaactggaaaatctcattttacaacagaactgagacagacgaccaccatattcactgaggtctaaatttgcagttccactaatgacattttgatttcccaacagagatacttctggtcttactgcacagtcttttaagagaaatacttccattatgccacattgtccttgatccgtaagtgatgtgttaaggtgcttcaaaggaactctgacctctgaagtacttgagctactttagtatgtccagcctattgctttttgttttagtgtgtcaccataaatatcaggggcataaaaggctatctattcttaattcaaggataaaacagaagaagcttgtggtataaaacaatagttcaagatccagctgaaatattagtggaatttgctactgactcattggactgaaagctgaagtacctggcaaaaaaaa

SEQ ID NO: 69 - DNA, 1211 bp, Homo sapiens
ggccccccccccccctagaaatgctcgaaccaggacggctcctggagtcctcgcgccctcgcagaaggactacgggccccggcgaccccgggggcggggcttccggcgcgctgccttgtgggcacggtagttccgccgggtctggcttccgcctgccgagcggccccggaccgcaggccggactacacttcccgtcggcccgcctgctctcccgatgccgccttggcgcgagacgttggcaagcagagtgtctccaagatggccgcttggggaaggaggcgtcttggcccgggcagcagtggcggcagcgcccgagagagggtgagcttgtcggccacagactgctacattgtgcatgagatctacaatggggagaatgcccaagaccagtttgagtacgagctggagcaggccctggaagcccagtacaagtacattgtgattgagcccactcgcattggcgacgagacagcccgctggatcaccgtgggcaactgcctgcacaagacggccgtgctggcgggcaccgcctgcctcttcaccccgttggcgctgcccttagattattcccactacatttccctgcccgctggtgtgctgagcctggcctgctgcaccctctatgggatctcctggcagtttgacccttgctgcaagtaccaagtggagtacgacgcctataaactgtcgcgcctgcctctgcacacactcacctcctccaccccggtggtgctggtccggaaggacgacctgcacagaaagagactgcacaacacgatagcactggccgccctggtgtactgtgtaaagaagatttacgaactctatgccgtatgatttcagtagaacagggagcgaagcaaaaccacccggcccacaagagacaacagagtattcagatcgccacactctgtgaggcagcagagcctgggcaggtgtttggcttagtatttgttatttttaaaaaataacagatcacgggtgtacccagggtttttcagctcattacactaagatgtggatttccataacccaagaggggggtctgaggctgtggaagtccgactgggcagtggaatgctgatggaggcagacgctgccgagggggtgtggacgtgctttgggggaggtctttaagtctattgtttaactgtaccatccagagcccaccagaagctattgatcattaaaattatgagaatttcaactcc

SEQ ID NO: 70 - DNA, 2362 bp, Homo sapiens
ctgagcgggggagcggcggcccccagctgaatgggcgcgagagcggcgctgggggcgggtgggggcgcggggtaccgggctggcggccggccggcgccccctcattagtatgcggacgaaggcggcgggctgcgcggagcggcgtcccctgcagccgcggaccgaggcagcggcggcacctgccggccgagcaatgccaagtgagtacacctatgtgaaactgagaagtgattgctcgaggccttccctgcaatggtacacccgagctcaaagcaagatgagaaggcccagcttgttattaaaagacatcctcaaatgtacattgcttgtgtttggagtgtggatcctttatatcctcaagttaaattatactactgaagaatgtgacatgaaaaaaatgcattatgtggaccctgaccatgtaaagagagctcagaaatatgctcagcaagtcttgcagaaggaatgtcgtcccaagtttgccaagacatcaatggcgctgttatttgagcacaggtatagcgtggacttactcccttttgtgcagaaggcccccaaagacagtgaagctgagtccaagtacgatcctccttttgggttccggaagttctccagtaaagtccagaccctcttggaactcttgccagagcacgacctccctgaacacttgaaagccaagacctgtcggcgctgtgtggttattggaagcggaggaatactgcacggattagaactgggccacaccctgaaccagttcgatgttgtgataaggttaaacagtgcaccagttgagggatattcagaacatgttggaaataaaactactataaggatgacttatccagagggcgcaccactgtctgaccttgaatattattccaatgacttatttgttgctgttttatttaagagtgttgatttcaactggcttcaagcaatggtaaaaaaggaaaccctgccattctgggtacgactcttcttttggaagcaggtggcagaaaaaatcccactgcagccaaaacatttcaggattttgaatccagttatcatcaaagagactgcctttgacatccttcagtactcagagcctcagtcaaggttctggggccgagataagaacgtccccacaatcggtgtcattgccgttgtcttagccacacatctgtgcgatgaagtcagtttggcgggttttggatatgacctcaatcaacccagaacacctttgcactacttcgacagtcaatgcatggctgctatgaactttcagaccatgcataatgtgacaacggaaaccaagttcctcttaaagctggtcaaagagggagtggtgaaagatctcagtggaggcattgatcgtgaattttgaacacagaaaacctcagttgaaaatgcaactctaactctgagagctgtttttgacagccttcttgatgtatttctccatcctgcagatactttgaagtgcagctcatgtttttaacttttaatttaaaaacacaaaaaaaattttagctcttcccactttttttttcctatttatttgaggtcagtgtttgtttttgcacaccattttgtaaatgaaacttaagaattgaattggaaagacttctcaaagagaattgtatgtaacgatgttgtattgatttttaagaaagtaatttaatttgtaaaacttctgctcgtttacactgcacattgaatacaggtaactaattggaaggagaggggaggtcactcttttgatggtggccctgaacctcattctggttccctgctgcgctgcttggtgtgacccacggaggatccactcccaggatgacgtgctccgtagctctgctgctgatactgggtctgcgatgcagcggcgtgaggcctgggctggttggagaaggtcacaacccttctctgttggtctgccttctgctgaaagactcgagaaccaaccagggaagctgtcctggaggtccctggtcggagagggacatagaatctgtgacctctgacaactgtgaagccaccctgggctacagaaaccacagtcttcccagcaattattacaattcttgaattccttggggattttttactgccctttcaaagcacttaagtgttagatctaacgtgttccagtgtctgtctgaggtgacttaaaaaatcagaacaaaacttctattatccagagtcatgggagagtacaccctttccaggaataatgttttgggaaacactgaaatgaaatcttcccagtattataaattgtgtatttaaaaaaaagaaacttttctgaatgcctacctggcggtgtataccaggcagtgtgccagtttaaaaagatgaaaaagaataaaaacttttgaggaac

SEQ ID NO: 71 - DNA, 1743 bp, Homo sapiens
ggtgttgttccggacacatagaaagataacgacgggaagagcggggcccgctttggggtccaggcaggttttggggcctcctgtctggtgggaggaggccgcagcgcagcaccctgctcgtcacttgggatggagaccggctttcccgcaatcatgtaccctggatcttttattgggggctggggagaagagtatctcagctgggaaggaccggggctcccagatttcgtcttccagcagcagcccgtggagtctgaagcaatgcactgcagcaaccccaagagtggagttgtgctggctacagtggcccgaggtcccgatgcttgtcagatactcaccagagccccgctgggccaggatcccccgcagaggacagtgctagggctgctaactgcaaatgggcagtacaggaggacctgtggccaggggatcacaagaatcaggtgttattctggatcagaaaatgccttccctccagctggaaagaaagcactccctgactgtggggtccaagagccccccaagcaagggtttgacatctacatggatgaactagagcagggggacagagacagctgctcggtcagagaggggatggcatttgaggatgtgtatgaagtagacaccggcacactcaagtcagacctgcacttcctgctggatttcaacacagtttcccctatgctggtagattcatctctcctctcccagtctgaagatatatccagtcttggcacagatgtgataaatgtgactgaatatgctgaagaaatttatcagtaccttagggaagctgaaataaggcacagacccaaagcacactacatgaagaagcagccagacatcacggaaggcatgcgcacgattctggtggactggctggtggaggttggggaagaatataaacttcgagcagagaccctgtatctggctgtcaacttcctggacaggttcctttcatgtatgtctgttctgagagggaaactgcagctcgtaggaacagcagctatgcttttggcttcgaaatatgaagagatatatcctcctgaagtagacgagtttgtctatatcaccgatgatacatacacaaaacgacaactgttaaaaatggaacacttgcttctgaaagttctagcttttgatctgacagtaccaaccaccaaccagtttctccttcagtacttgaggcgacaaggagtgtgcgtcaggactgagaacctggctaagtacgtagcagagctgagtctacttgaagcagatccattcttgaaatatcttccttcactgatagctgcagcagctttttgcctggcaaactatactgtgaacaagcacttttggccagaaacccttgctgcatttacagggtattcattaagtgaaattgtgccttgcctgagtgagcttcataaagcgtaccttgatataccccatcgacctcagcaagcaattagggagaagtacaaggcttcaaagtacctgtgtgtgtccctcatggagccacctgcagttcttcttctacaataagtttctgaatggaagcacttccagaacttcacctccatatcagaagtgccaataatcgtcataggcttctgcacgttggatcaactaatgttgtttacaatatagatgacattttaaaaatgtaaatgaatttagtttcccttagactttagtagtttgtaatatagtccaacattttttaaacaataaactgcttgtcttatgacaaaaaaaaaa

SEQ ID NO: 72 - DNA, 4171 bp, Homo sapiens
gggccgcctctgcacgtccgccccggagcccgcacccgcgccccacgcgccgccgaggactcggcccggctcgtggagcccttcgcccgcggcgtgagtacccccgacccgcccgtccccgctctgctcgcgccctgccgctgcgccgccctcggtggcttttccgacgggcgagccccgtgctgtgcgggaaagaatccgacaacttcgcagcccatcccggctggacgcgaccgggagtgcagcagcccgttcccctcctcggtgccgcctctgcccagcgtttgcttggctgggctaccacctgcgctcggacggcgctcggagggtcctcgcccccggcctgcctacctgaaaaccagaactgatggctctatttgcagtctttcagacaacattcttcttaacattgctgtccttgaggacttaccagagtgaagtcttggctgaacgtttaccattgactcctgtatcacttaaagtttccaccaattctacgcgtcagagtttgcacttacaatggactgtccacaaccttccttatcatcaggaattgaaaatggtatttcagatccagatcagtaggattgaaacatccaatgtcatctgggtggggaattacagcaccactgtgaagtggaaccaggttctgcattggagctgggaatctgagctccctttggaatgtgccacacactttgtaagaataaagagtttggtggacgatgccaagttccctgagccaaatttctggagcaactggagttcctgggaggaagtcagtgtacaagattctactggacaggatatattgttcgttttccctaaagataagctggtggaagaaggcaccaatgttaccatttgttacgtttctaggaacattcaaaataatgtatcctgttatttggaagggaaacagattcatggagaacaacttgatccacatgtaactgcattcaacttgaatagtgtgcctttcattaggaataaagggacaaatatctattgtgaggcaagtcaaggaaatgtcagtgaaggcatgaaaggcatcgttctttttgtctcaaaagtacttgaggagcccaaggacttttcttgtgaaaccgaggacttcaagactttgcactgtacttgggatcctgggacggacactgccttggggtggtctaaacaaccttcccaaagctacactttatttgaatcattttctggggaaaagaaactttgtacacacaaaaactggtgtaattggcaaataactcaagactcacaagaaacctataacttcacactcatagctgaaaattacttaaggaagagaagtgtcaatatcctttttaacctgactcatcgagtttatttaatgaatccttttagtgtcaactttgaaaatgtaaatgccacaaatgccatcatgacctggaaggtgcactccataaggaataatttcacatatttgtgtcagattgaactccatggtgaaggaaaaatgatgcaatacaatgtttccatcaaggtgaacggtgagtacttcttaagtgaactggaacctgccacagagtacatggcgcgagtacggtgtgctgatgccagccacttctggaaatggagtgaatggagtggtcagaacttcaccacacttgaagctgctccctcagaggcccctgatgtctggagaattgtgagcttggagccaggaaatcatactgtgaccttattctggaagccattatcaaaactgcatgccaatggaaagatcctgttctataatgtagttgtagaaaacctagacaaaccatccagttcagagctccattccattccagcaccagccaacagcacaaaactaatccttgacaggtgttcctaccaaatctgcgtcatagccaacaacagtgtgggtgcttctcctgcttctgtaatagtcatctctgcagaccccgaaaacaaagaggttgaggaagaaagaattgcaggcacagagggtggattctctctgtcttggaaaccccaacctggagatgttataggctatgttgtggactggtgtgaccatacccaggatgtgctcggtgatttccagtggaagaatgtaggtcccaataccacaagcacagtcattagcacagatgcttttaggccaggagttcgatatgacttcagaatttatgggttatctacaaaaaggattgcttgtttattagagaaaaaaacaggatactctcaggaacttgctccttcagacaaccctcacgtgctggtggatacattgacatcccactccttcactctgagttggaaagattactctactgaatctcaacctggttttatacaagggtaccatgtctatctgaaatccaaggcgaggcagtgccacccacgatttgaaaaggcagttctttcagatggttcagaatgttgcaaatacaaaattgacaacccggaagaaaaggcattgattgtggacaacctaaagccagaatccttctatgagtttttcatcactccattcactagtgctggtgaaggccccagtgctacgttcacgaaggtcacgactccggatgaacactcctcgatgctgattcatatcctactgcccatggttttctgcgtcttgctcatcatggtcatgtgctacttgaaaagtcagtggatcaaggagacctgttatcctgacatccctgacccttacaagagcagcatcctgtcattaataaaattcaaggagaaccctcacctaataataatgaatgtcagtgactgtatcccagatgctattgaagttgtaagcaagccagaagggacaaagatacagttcctaggcactaggaagtcactcacagaaaccgagttgactaagcctaactacctttatctccttccaacagaaaagaatcactctggccctggcccctgcatctgttttgagaacttgacctataaccaggcagcttctgactctggctcttgtggccatgttccagtatccccaaaagccccaagtatgctgggactaatgacctcacctgaaaatgtactaaaggcactagaaaaaaactacatgaactccctgggagaaatcccagctggagaaacaagtttgaattatgtgtcccagttggcttcacccatgtttggagacaaggacagtctcccaacaaacccagtagaggcaccacactgttcagagtataaaatgcaaatggcagtctccctgcgtcttgccttgcctcccccgaccgagaatagcagcctctcctcaattacccttttagatccaggtgaacactactgctaaccagcatgccgatttcataccttatgctacacagacattaagaagagcagagctggcaccctgtcatcaccagtggccttggtccttaatcccagtacaatttgcaggtctggtttatataagaccactacagtctggctaggttaaaggccagaggctatggaacttaacactccccattggagcaagcttgccctagagacggcaggatcatgggagcatgcttaccttctgctgtttgttccaggctcacctttagaacaggagacttgagcttgacctaaggatatgcattaaccactctacagactcccactcagtactgtacagggtggctgtggtcctagaagttcagtttttactgaggaaatatttccattaacagcaattattatattgaaggctttaataaaggccacaggagacattactatagcatagattgtcaaatgtaaatttactgagcgtgttttataaaaaactcacaggtgtttgaggccaaaacagattttagacttaccttgaacggataagaatctatagttcactgacacagtaaaattaactctgtgggtgggggcggggggcatagctctaatctaatatataaaatgtgtgatgaatcaacaagatttccacaattcttctgtcaagcttactacagtgaaagaatgggattggcaagtaacttctgacttactgtcagttgtacttctgctccatagacatcagtattctgccatcatttttgatgactacctcagaacataaaaaggaacgtatatcacataattccagtcacagtttttggttcctcttttctttcaagaactatatataaatgacctgttttcacgcggccgc

SEQ ID NO: 73 - DNA, 2384 bp, Homo sapiens
atctgccaccgcagtctggttggagctgttgtcttgtatgctcagcgaggcccggagagacccgggagagagctaggccgagtccaccgcccgagtctgctgcccgagcccgcgttacgcacaaagccgccgatccccggcctggggtgagcagagcgaccaccgcccgggagcagcgcggcgagacgcacggtgcgccctatgcccccgcgcccccaccgcccccgccgcggcagccgaagcgcagcgagagaacgcgccaccgcggggcccgggtgcagctagcgaccctctcgccacctgcgcgcagcccgaggtgagcagtgagcggcgagcgggagggcagcgaggcgttcgcgggccccctcctgctgcccgggcccggcccgctcatggcggccatccgcaagaagctggtggtggtgggcgacggcgcgtgtggcaagacgtgcctgctgatcgtgttcagtaaggacgagttccccgaggtgtacgtgcccaccgtcttcgagaactatgtggccgacattgaggtggacggcaagcaggtggagctggcgctgtgggacacggcgggccaggaggactacgaccgcctgcggccgctctcctacccggacaccgacgtcattctcatgtgcttctcggtggacagcccggactcgctggagaacatccccgagaagtgggtccccgaggtgaagcacttctgtcccaatgtgcccatcatcctggtggccaacaaaaaagacctgcgcagcgacgagcatgtccgcacagagctggcccgcatgaagcaggaacccgtgcgcacggatgacggccgcgccatggccgtgcgcatccaagcctacgactacctcgagtgctctgccaagaccaaggaaggcgtgcgcgaggtcttcgagacggccacgcgcgccgcgctgcagaagcgctacggctcccagaacggctgcatcaactgctgcaaggtgctatgagggccgcgcccgtcgcgcctgcccctgccggcacggctccccctcctggaccagtcccccgcgagcccggagaaggggagacccgtgtcccacaaggaccccaccggcctgcctggcatctgtctgctgacgcctctggcttgcgccaggacttggcgtgggcaccgggcgcccccatcccagtgtctgtgtgcgtccagctgtgttgcacaggcctgggctccccactgagtgccaagggtcccctgagcatgcttttctgaagagccgggcctcagagtgtgtggctgtgtgtctgttcgactcccctcgccccattttcaccccacccccgcctctgatccccgggggcgagattggcgcgggagtgtggccgcgccccatcagatgttctcccttcaccagcgggagcttgatatcccttgtctgtaacatagaccccgggtactgcgggaggggagggctgctggggaggatggggggatgttatataaatatagatataattttattttcggagctaagatggtgttatttaagggtggtgatgggtgagcgctctggcccaggctgggccagactcccgcccaagcatgaacaggacttgaccatctttccaacccctggggaagacatttgcaactgacttggggaggacacagcttcagcacagcctctcctgcgggccagcccgctgcgaaccctccaccagctaccggagggaggagggaggatgcgctgtggggttgtttttgccataagcgaactttgtgcctgtcctagaagtgaaaattgttcagtccaagaaactgatgttatttgatttatttaaaggctaaaatttgtttttttattctttgcacaattgtttcattgtttgacacttaatgcactcgtcatttgcatacgacagtagcattctgaccacacttgtacgctgtaacctcatctacttctgatgtttttaaaaaatgacttttaacaaggagagggaaaagaaacccactaaattttgctttgtttccttgaagaatgtggcaacactgttttgtgattttatttgtgcaggtcatgcacacagttttgataaagggcagtaacaagtattggggcctattttttttttttccacaaggcattctctaaagctatgtgaaattttctctgcacctctgtacagagaatacacctgcccctgtatatccttttttcccctcccctccctcccagtggtacttctactaaattgttgtcttgttttttattttttaaataaactgacaaatgacaaaatggtgagcttatgatgtttacataaaagttctataagctgtgtatacagttttttatgtaaaatattaaaagactatgatgatgacatttaaaaaaaaaaaaaaaaaa

SEQ ID NO: 74 - DNA, 1817 bp, Homo sapiens
gccgccacttccgagagcgcctgccgcccctgcgccgccgagccagctgccagaatgccgaactggggaggaggcaagaaatgtggggtgtgtcagaagacggtttactttgccgaagaggttcagtgcgaaggcaacagcttccataaatcctgcttcctgtgcatggtctgcaagaagaatctggacagtaccactgtggccgtgcatggtgaggagatttactgcaagtcctgctacggcaagaagtatgggcccaaaggctatggctacgggcagggcgcaggcaccctcagcactgacaagggggagtcgctgggtatcaagcacgaggaagcccctggccacaggcccaccaccaaccccaatgcatccaaatttgcccagaagattggtggctccgagcgctgcccccgatgcagccaggcagtctatgctgcggagaaggtgattggtgctgggaagtcctggcataaggcctgctttcgatgtgccaagtgtggcaaaggccttgagtcaaccaccctggcagacaaggatggcgagatttactgcaaaggatgttatgctaaaaacttcgggcccaagggctttggttttgggcaaggagctggggccttggtccactctgagtgaggccaccatcacccaccacaccctgcccactcctgcgcttttcatcgccattccattcccagcagctttggagacctccaggattatttctctgtcagccctgccacatatcactaatgacttgaacttgggcatctggctccctttggtttgggggtctgcctgaggtcccaccccactaaagggctccccaggcctgggatctgacaccatcaccagtaggagacctcagtgttttgggtctaggtgagagcaggcccctctccccacacctcgccccacagagctctgttcttagcctcctgtgctgcgtgtccatcatcagctgaccaagacacctgaggacacatcttggcacccagaggagcagcagcaacaggctggagggagagggaagcaagaccaagatgaggaggggggaaggctgggttttttggatctcagagattctcctctgtgggaaagaggttgagcttcctggtgtccctcagagtaagcctgaggagtcccagcttagggagtcactattggaggcagagaggcatgcaggcggggtcctaggagcccctgcttctccaggcctcttgcctttgagtctttgtggaatggatagcctcccactaggactgggaggagaataacccaggtcttaaggaccccaaagtcaggatgttgtttgatcttctcaaacatctagttccctgcttgatgggaggatcctaatgaaatacctgaaacatatattggcatttatcaatggctcaaatcttcatttatctctggccttaaccctggctcctgaggctgcggccagcagagcccaggccagggctctgttcttgccacacctgcttgatcctcagatgtggagggaggtaggcactgcctcagtcttcatccaaacacctttccctttgccctgagacctcagaatcttccctttaacccaagaccctgcctcttccactccacccttctccagggacccttagatcacatcactccacccctgccaggccccaggttaggaatagtggtgggaggaaggggaaagggctgggcctcaccgctcccagcaactgaaaggacaacactatctggagccacccactgaaagggctgcaggcatgggctgtacccaagctgatttctcatctggtcaataaagctgtttagaccag

SEQ ID NO: 75 - DNA, 1890 bp, Homo sapiens
atggtgctgtgcccggtgattgggaagctgctgcacaagcgcgtggtgctggccagcgcctccccacgccgtcaggagatcctcagcaacgcgggtctcaggtttgaggtggtcccctccaagtttaaagagaagctggacaaagcctccttcgctactccgtatgggtacgccatggagaccgccaagcagaaggccctggaggtggccaaccggctataccagaaagacctgcgggcccccgacgtggtcattggagcggacacgatcgtgacggtcggggggctgattctggagaagccggtggacaagcaggacgcctacaggatgctgtcccggttgagtgggagagaacacagcgtgttcacaggtgtcgcgatcgtccactgctccagcaaagaccatcagctggacaccagggtctcggaattctacgaggaaacgaaggtgaagttctcggagctgtccgaggagctgctctgggaatacgtccacagcggggagcccatggacaaagctggcggctacggtatccaggccctgggcggcatgctggtggagtccgtacacggggactttctgaacgtggtgggattcccgctgaaccacttctgcaagcagctggtgaagctctactacccgccccgtccggaggacctgcggcggagtgtcaagcacgactccatcccggccgcggacaccttcgaagacctcagtgacgtggaggggggcggctcggagcccactcagagggacgcgggcagccgcgatgagaaggccgaggcgggagaggcgggacaggccacggcagaggctgagtgtcacaggactcgggagaccctgcctccgttcccgacacgcctcctggagctgattgagggctttatgctatccaagggcctgctcaccgcttgcaaactgaaggtgttcgatttattaaaagatgaagcaccccagaaggctgcggatattgccagcaaagtggacgcctctgcgtgtggaatggagaggcttctggacatctgtgctgccatggggctcctggagaagacagagcaaggttacagtaacacagagacagcgaacgtctacctggcatcggatggcgaatactctctgcacggcttcatcatgcacaataatgacctcacatggaacctctttacatacctggagtttgccatccgagagggaacaaaccagcaccacagggcgttggggaagaaggcggaagatctgttccaggatgcgtactaccagagcccggagacgcggctgaggttcatgcgggccatgcacggcatgacgaagctgactgcgtgccaggtggccacggccttcaatctgtcccgcttctcctccgcctgcgacgtgggaggctgcacgggtgcactggcccgagagctggcccgtgagtaccctcgtatgcaggtgactgtgtttgacctcccagacattatcgagctggccgcccacttccaaccccccggaccgcaggcagtgcagatccacttcgcagcaggtgactttttcagggaccccctccccagcgctgagctgtacgtcctgtgccggatcctgcatgactggccagacgacaaagtccacaagttactcagcaaggtcgccgagagctgcaagccaggggccggcctgctgctggtggagacgctcctggatgaggagaagagggtggcgcagcgcgccctgatgcagtcactgaacatgctggtgcagactgaaggcaaggagcggagcctgggcgagtatcagtgcttgctggagctgcacggcttccaccaggtgcaggtggtgcacttggggggtgtcctggatgccatcttgccaccaaagtggccccctgaagcccaggcagcatgttcattatag

SEQ ID NO: 76 - DNA, 2000 bp, Homo sapiens
cttggcacgagggattggtctgtgctcctctctcggctcctcgcggctcgcggcggccgacggttcctgggacacctgcttgcttggcccgtccggcggctcagggcttctctgctgcgctcccggttcgctggacgggaagaagggctgggccgtcccgtcccgtccccatcggaaccccaagtcgcgccgctgacccgtcgcagggcgagatgagcgcggacgcagcggccggggcgcccctgccccggctctgctgcctggagaagggtccgaacggctacggcttccacctgcacggggagaagggcaagttgggccagtacatccggctggtggagcccggctcgccggccgagaaggcggggctgctggcgggggaccggctggtggaggtgaacggcgaaaacgtggagaaggagacccaccagcaggtggtgagccgcatccgcgccgcactcaacgccgtgcgcctgctggtggtcgaccccgagacggacgagcagctgcagaagctcggcgtccaggtccgagaggagctgctgcgcgcccaggaagcgccggggcaggccgagccgccggccgccgccgaggtgcagggggctggcaacgaaaatgagcctcgcgaggccgacaagagccacccggagcagcgcgagcttcggcctcggctctgtaccatgaagaagggccccagtggctatggcttcaacctgcacagcgacaagtccaagccaggccagttcatccggtcagtggacccagactccccggctgaggcttcagggctccgggcccaggatcgcattgtggaggtgaacggggtctgcatggaggggaagcagcatggggacgtggtgtccgccatcagggctggcggggacgagaccaagctgctggtggtggacagggaaactgacgagttcttcaagaaatgcagagtgatcccatctcaggagcacctgaatggtcccctgcctgtgcccttcaccaatggggagatacagaaggagaacagtcgtgaagccctggcagaggcagccttggagagccccaggccagccctggtgagatccgcctccagtgacaccagcgaggagctgaattcccaagacagccccccaaaacaggactccacagcgccctcgtctacctcctcctccgaccccatcctagacttcaacatctccctggccatggccaaagagagggcccaccagaaacgcagcagcaaacgggccccgcagatggactggagcaagaaaaacgaactcttcagcaacctctgagcgccctgctgccacccagtgactggcagggccgagccagcattccaccccacctttttccttctccccaattactcccctgaatcaatgtacaaatcagcacccacatcccctttcttgacaaatgatttttctagagaactatgttcttccctgactttagggaaggtgaatgtgttcccgtcctcccgcagtcagaaaggagactctgcctccctcctcctcactgagtgcctcatcctaccgggtgtccctttgccaccctgcctgggacatcgctggaacctgcaccatgccaggatcatgggaccaggcgagagggcaccctcccttcctcccccatgtgataaatgggtccagggctgatcaaagaactctgactgcagaactgccgctctcagtggacagggcatctgttatcctgaaccttggcagacacgtcttgttttcatttgattttgttaagagtgcagtattgcagagtctagaggaatttttgtttccttgattaacatgattttcctggttgttaatccagggcatggcagtggcctcagccttaaacttttgttcctactcccaccctcagcgaactgggcagcacggggagggtttggctacccctgcccatccctgagccaggtaccaccattgtaaggaaacactttcagaaattcagctggttcctccaaaccaaaaaaaaaaaaaaaa

SEQ ID NO: 77 - DNA, 8843 bp, Homo sapiens
agccggcgagcggcagcagctccgggctcgagagcccgcgcccatgccagtgcccatgcggggccgccgccagtgacgccggagaggtgttccccccacactggggctcccactactgcgaggagtgacccacgaaggccacagagatggccggggcttcggtgaaggtggcggtgcgggtccgccccttcaattcccgggaaatgagccgtgactccaagtgcatcattcagatgtctggaagcaccaccaccattgttaaccccaaacagcccaaggagacgcccaaaagcttcagctttgactactcctactggtcgcacacctcacctgaggacatcaactacgcgtcgcagaagcaggtgtaccgggacatcggcgaggagatgctgcagcatgcctttgagggatacaacgtgtgcatcttcgcctatgggcagacgggtgccggcaagtcctacaccatgatgggcaagcaggagaaggaccagcagggcatcatcccacagctctgcgaggacctcttctctcggatcaacgacacgaccaacgacaacatgtcctactccgtggaggtcagctacatggagatttactgtgagcgcgtccgtgacctcctgaaccccaagaacaagggcaaccttcgcgtgagggagcacccactgctggggccctacgtggaggacctctccaagctggctgtcacctcctacaatgacatccaggacctcatggactcagggaacaaggccaggaccgtggcggccaccaacatgaatgagaccagcagtcgctcccacgccgtcttcaacatcatcttcacccagaagcgccatgacgcagagaccaatatcaccacggagaaggtgagcaaaatcagcctggtggacctggctgggagcgagcgggctgactccacgggagccaagggcacgcgcctcaaggagggggccaacatcaacaagtcgctgaccaccctgggcaaggtcatctccgccctggctgaaatggactccggacccaacaagaacaagaaaaagaagaagacagatttcattccgtaccgagattccgtgttgacctggctcctccgggaaaacctgggcggtaactcaaggacagctatggtggcagccttgagtcctgcagacatcaactacgatgagacccttagcacgctgaggtatgctgaccgggccaagcagatccgctgcaatgctgtcatcaatgaggaccccaacaacaagctgatccgcgagctgaaggatgaggtgacccggctgcgggaccttctgtacgcccagggtcttggcgacatcactgacatgaccaatgccctggtgggtatgagcccctcatcctcgctctcagccctgtccagccgcgcggcctccgtgtccagcctccacgagcgcatcttgtttgccccgggcagcgaggaggccattgaaagactgaaggaaacagagaagatcatagctgagctcaatgagacctgggaggagaagctgcggcggacagaagccatccggatggagagggaagccctgctggccgagatgggtgtggccatgagggaggatggcggcaccttgggcgtattctctcccaaaaagacaccacacctcgtcaacctgaacgaggacccgctgatgtctgagtgcctgctctactacatcaaggatgggatcaccagagtgggcagggaggatggcgagaggcggcaggacattgttctgagtgggcacttcatcaaggaggagcactgcgtcttccggagcgactccaggggaggcagcgaagctgtggtgaccttggagccctgtgagggggcagacacctacgtcaatggcaagaaagtcacagagcccagcatcctgcgttcaggaaaccgcatcatcatgggtaagagccatgtgttccggttcaaccaccccgagcaggcccggcaggagcgtgagcgcacgccttgtgcggagacgccagctgagcctgtggactgggccttcgcccagcgtgagctgctggagaagcagggcatcgacatgaagcaggagatggagcagaggctccaggaactggaggaccagtaccgccgcgagcgggaggaggccacctacctgctggagcagcagcggctggactatgagagcaagctggaggctctgcagaagcagatggactccaggtactacccggaggtgaacgaggaggaggaggagcccgaggatgaagtccagtggacagagcgggagtgtgagctggcgctctgggccttccggaagtggaagtggtaccagttcacgtctctgcgggacctgctgtggggcaacgccatcttcctcaaggaggccaatgccatcagcgtggagctgaaaaagaaggtacaattccagtttgtcctcctgacggacacactctactcccctctgccacccgacctgctgcccccagaggccgccaaagaccgagagacgcggcccttcccccgcaccattgtggccgtggaggtccaggaccagaagaacggggccacccactactggacgctggagaagctcaggcagcgtctggacctgatgcgggagatgtacgaccgcgctgcagaggtgccctccagtgtcatcgaggactgtgacaacgtggtgaccggcggagaccccttctatgaccgcttcccctggttccggctggtgggcagggccttcgtgtacctgagcaacctgctgtaccccgttcccctggtacaccgtgtggcaatcgtcagcgagaagggcgaggtgaagggcttcctccgcgtggccgtccaggccatctcagccgatgaagaggcccctgattatggctctggcgtccgccagtcgggaactgctaaaatctcctttgatgaccagcattttgaaaagttccagtccgagtcttgccccgtggtggggatgtcccgctcgggaacctcccaggaagagcttcgcatcgtggagggccagggccagggtgcagacgtggggccctcagccgatgaagtcaacaacaacacctgttcagcagtgcccccagaaggcctcctcctagacagctctgagaaagccgccctggatgggcccctggatgctgccctggaccacctccgcctgggcaacaccttcaccttccgtgtgacagtcctgcaggcgtccagcatctctgccgaatatgccgacatcttctgccagttcaacttcatccaccgccacgacgaggccttctccacagagcccctgaagaacacaggcagaggccccccacttggcttctaccacgtccagaacatcgcagtggaggtgaccaagtccttcattgagtacatcaagagccagcccattgttttcgaggtctttggccactaccagcagcacccgttcccgcccctctgcaaggacgtgctcagccccctgaggccctcgcgccgccacttccctcgggtcatgccactgtccaagccagtgcccgccaccaagctcagcacactgacgcggccctgtccgggaccctgccactgcaagtacgacctgctggtctacttcgagatctgtgagctggaggccaacggcgattacatcccggccgtggtggaccaccgtgggggcatgccatgcatggggaccttcctcctccaccagggcatccagcgacggattacggtgacactactgcatgagacaggcagccatatccgctggaaggaagtgcgcgagctggtcgtgggccgcatccgaaacactccagagaccgacgagtccctgatcgaccccaacatcttgtctctcaacatcctctcttccggatacatccacccagcccaagatgaccggaccttttaccaatttgaggctgcgtgggacagctccatgcacaactctctcctgctgaaccgggtcaccccttatcgagagaaaatctacatgacactctccgcttatatcgagatggagaactgcacccagccggctgttgtcaccaaggacttctgcatggtcttctattcccgtgatgccaagctgccagcctcgcgctccatccgcaacctctttggcagtgggagccttcgggcctcagagagtaaccgtgtgactggtgtgtacgagctcagcctgtgccacgtggctgacgcgggcagcccagggatgcagcgccggcgccgacgagtcctggacacatctgtggcctatgtccggggcgaggagaacctggcaggctggaggccccggagtgacagtctcattctggaccaccagtgggagctggagaagctgagcctcctgcaggaggtggagaagactaggcactacctgctcctgcgggagaagctggagaccgcccagcggcctgtcccggaggcactgtccccggccttcagcgaggactctgagtcccatggctcctccagcgcctcctccccgctctcggctgagggccgcccatcacccctggaggctcccaacgagaggcagcgggagctggccgtcaagtgcttgcgcctgctcacgcacacattcaacagagagtacacacacagccacgtctgcgtcagtgccagcgagagcaagctctccgagatgtctgtcaccctgctccgggacccgtcgatgtcccctctaggggtggccactctcaccccctcctccacttgcccctctctggttgaagggcggtacggtgccactgacctgaggaccccgcagccctgctcccggccagccagcccagagcccgagctgctgccagaggccgactccaagaagctcccttcccctgcccgggcaacagagacagacaaggagccccagcgcctgctggtccctgacatccaggagatccgagtcagcccgatcgtttccaagaaggggtacctgcacttcctggagccgcacacgtcaggctgggccaggcgcttcgtggtggtgcggcgcccctatgcctacatgtacaacagcgacaaggacaccgtggagcggttcgtgctcaacctggccactgcccaggtggagtacagtgaggaccagcaggctatgctcaagacacccaacacattcgcggtgtgcacggaacaccgcggcatcctgctgcaggccgccagcgacaaggacatgcatgactggctgtacgccttcaaccccctcctggccgggaccatacggtccaagctctccagaaggaggtctgcccagatgcgggtctgaacctgagccctcccgtgacagccggcaggcccagcccatcccctccctcatcctcgtctgtcctgtcacctgccgcccagcccctctcctgccagacagcccacgaccgggtcgaccccccaggggacgcccatgccaggcccggggacctgtgccacacgaccagctgtgctcccagcagaggctgtgcgtgtcagttcttcttgcagaatgtgctctggtggaacaagttgggagaggctgggggggccaagggcacaggttacgggggttcttgctgccgttctaatatttttttaagcatagacagacttataattaatatacgttagttagtgacattgaaacagtcaactcggaaattaactataagacttgttctatttataagtatttatttctaatgcctccacatagccctgtaatattcagatggaacccccaaccacctccaccctgtttgttcccacatgtgtctcccaagcctgctagggacaggcagggcagggacagccaccttggaaggccgcagtgaggagctgtctggaccagtggggcaccttggggctagcacacgggtgtatcgcctgggccccaggcttctccatggccacatgggtcctgggtgtatgtgtgggagagtgggggggtgtctttggtgcctgaagtctgcgcggcatggagggtggtgtgagttcctctggtgggagggagaacgcacatctcttctgggcggccacctgaggagtgactccaagaagagttccggcagctttccccaggaaagggtgaggggtgacactcggctctggctctgagatgaggcagacggcacccaggctgtgatctgtcctgggcggggaccaggagggagcggggtcgggatcacctgccagtgtgcagactctgggactgcgtgctgtctccggaccatcagggtagggtggtgggttgagaccaggaagtcagggaagatcggaattcagggcgacggtctaggtgtcgagggctgtggcgcagcctcttcagctgcggcgagaaatggagtgagtcaaggtagcttctgggaagaaatgctgccattagcaggtttcttgcaaagactttcctctctttgttcccagggcagagagtttctgtgagtcccactgagaaaatcccatggggtgggggtatcctggtcggtcggcaatggagggtggctggcttggtggttattgtcttcaaggagctcttcgctgctgcatctgcggtgtccctttgttcttgtcccatttcaccccctctgcagacaccaatgtccgagggccacccaggacaggacgggggtcagccccaagctgagagtctggtcataggagtcatgtccagaggcctagggaggttttagggccctccccacccacacccacaggtcgatttggtctctttttagctcaaggaaagacagtagccaagcaacagagcccctctcccgccgtggcccgtgggagcagttacatcgggtctggtgctccagacctagggcccagcactttcatcagatcctgcctcctggagtgggggaaacgcagcaccccactggttctgaggcccctaccctcccaggctgtcccacgtgatgctgacatgagcctcagagaccccaatcccatgcctgggggagagacagcggctcaggagtgggggagcacgggccttctacaccacatgggaaggctctggcatgaggttttcctttgggaaggttgtttgggcccctgaagttccatctccgagagtggtgtgcagggcaggccagggcccatgctggctgcagtctctgtggctgcctgcctgggccagcctgtttgggagctgggactgtgggctcgccttttcgtacctgggctcaggtgcggtgtggccaccgccaccctcatcccctgcctgggaggctctcccaggggctgatgggggggttctgtgagggagaatcagggctcgggaagccacgcctgggaaggcaggacacaggacacagcagctttctttggaaatctcccaggtgaggattcacatcccaaaataaaattcagaagccaggtggcctgtgctccccatgggtgacctctggaggcagtggaccaagatgcagcaaggagaggatgcagaacagcttcttgcagaagcacctgctccggcatccagcgctgcctggaggcaggaaggagaggcagggcaggacacgctggtctgagatgagggggagccccacgggccccaggcaggctagaggaggcacaggccctgccacggccaactcaggtcagccagcctgaggctgtggcctccaaagggtctgggcgcaccccccaggtcgcaggtgtctgaggccagccaacctgcagagcactcgcggcgtgggtgggctgagtggaggtgcctgggagctgcctaaattcagaagcctccactgccatggagactgcctggctgtgtcctctcagccaggtgccgtgttggccttggctaggacccagagccacactgcagcctccgccgactccctccttccgggcctgctctagtgaggagtgcctaagccaggacccagaaactcagagttgatggtgagaggaggccgcctgagtcaggacacctggcttcttgaaaagttcgctctgccagaaaccacctagggaccacgttagctgccttccttgagctccccaggagtcggtttccacatctgtgaggtggagggctggtgtggaggtgctcatggggtgcggtgcttgggagacagccaggcccagggtggctgctgcttcctgctaagtgggggaggtgagacagatctggaaagccgtctccctcagatggtttcatttaatgctttatactgccgagtctgggggcttgttttggtttgggggcagccatcctccaccagaaagggggagctccttccgctgcggctccagatagatggggatgccgggctccaggccgaccagcacttgggatctgatgggacacggccagtgcctaggggtgccaagtccaaggcctcccactgggagtcatcgctgagaagatgccaatgtttcatccaccggctgcacaggcacaaactcccccacccaggacggctgtgatgaggtggccctccctgtcaaccctggtccctggagtccccagcacctggggccctggtggggctgatgtcacaggtgtttactgtgctgctgcactggtcctatgccagcctcacccatgtggggaccacggaaggcacactcccttacccccggtgccgggccgtgcggtcccccagacggacagcagctgtggcgacctgcgtttctccctgggcctgtgcttcctgtagttagtccgtcccctggttcccctgtggctcagaggccgcgtccctggcttgtacatatgtgattgctgtgggcacaccccagaccccatgtcatagctgccgtcccgacgtcacgacgcctgtcccgatgtcttacacccgagtgttagccctaggctcctgtactgtgcgtgcacttgaggctctgtccaattaagaaataaatgtggctcttactcaacacaaaaaaaaaaaaaaaaaaaaaaaaaaaa

SEQ ID NO: 78 - DNA, 1311 bp, Homo sapiens
tagtcgggcggggttgtgagacgccgcgctcagcttccatcgctgggcggtcaacaagtgcgggcctggctcagcgcgggggggcgcggagaccgcgaggcgaccgggagcggctgggttcccggctgcgcgcccttcggccaggccgggagccgcgccagtcggagcccccggcccagcgtggtccgcctccctctcggcgtccacctgcccggagtactgccagcgggcatgaccgacccaccaggggcgccgccgccggcgctcgcaggccgcggatgaagaagaaaacccggcgccgctcgacccggagcgaggagttgacccggagcgaggagttgaccctgagtgaggaagcgacctggagtgaagaggcgacccagagtgaggaggcgacccagggcgaagagatgaatcggagccaggaggtgacccgggacgaggagtcgacccggagcgaggaggtgaccagggaggaaatggcggcagctgggctcaccgtgactgtcacccacagcaatgagaagcacgaccttcatgttacctcccagcagggcagcagtgaaccagttgtccaagacctggcccaggttgttgaagaggtcataggggttccacagtcttttcagaaactcatatttaagggaaaatctctgaaggaaatggaaacaccgttgtcagcacttggaatacaagatggttgccgggtcatgttaattgggaaaaagaacagtccacaggaagaggttgaactaaagaagttgaaacatttggagaagtctgtggagaagatagctgaccagctggaagagttgaataaagagcttactggaatccagcagggttttctgcccaaggatttgcaagctgaagctctctgcaaacttgataggagagtaaaagccacaatagagcagtttatgaagatcttggaggagattgacacactgatcctgccagaaaatttcaaagacagtagattgaaaaggaaaggcttggtaaaaaaggttcaggcattcctagccgagtgtgacacagtggagcagaacatctgccaggagactgagcggctgcagtctacaaactttgccctggccgagtgaggtgtagcagaaaaaggctgtgctgccctgaagaatggcgccaccagctctgccgtctctggatcggaatttacctgatttcttcagggctgctgggggcaactggccatttgccaattttcctactctcacactggttctcaatgaaaaatagtgtctttgtgatttgagtaaagctcctattctgtttttcacaaaaaaaaaaaaa

SEQ ID NO: 79 - DNA, 3809 bp, Homo sapiens
gccgctgttatgcgtattcccgtagacccaagcaccagccgccgcttcacacctccctccccggccttcccctgcggcggcggcggcggcaagatgggcgagaacagcggcgcgctgagcgcgcaggcggccgtggggcccggagggcgcgcccggcccgaggtgcgctcgatggtggacgtgctggcggaccacgcaggcgagctcgtgcgcaccgacagccccaacttcctctgctccgtgctgccctcgcactggcgctgcaacaagacgctgcccgtcgccttcaaggtggtggcattgggggacgtgccggatggtacggtggtgactgtgatggcaggcaatgacgagaactactccgctgagctgcgcaatgcctcggccgtcatgaagaaccaggtggccaggttcaacgaccttcgcttcgtgggccgcagtgggcgagggaagagtttcaccctgaccatcactgtgttcaccaaccccacccaagtggcgacctaccaccgagccatcaaggtgaccgtggacggaccccgggagcccagacggcaccggcagaagctggaggaccagaccaagccgttccctgaccgctttggggacctggaacggctgcgcatgcgggtgacaccgagcacacccagcccccgaggctcactcagcaccacaagccacttcagcagccagccccagaccccaatccaaggcacctcggaactgaacccattctccgacccccgccagtttgaccgctccttccccacgctgccaaccctcacggagagccgcttcccagaccccaggatgcattatcccggggccatgtcagctgccttcccctacagcgccacgccctcgggcacgagcatcagcagcctcagcgtggcgggcatgccggccaccagccgcttccaccatacctacctcccgccaccctacccgggggccccgcagaaccagagcgggcccttccaggccaacccgtccccctaccacctctactacgggacatcctctggctcctaccagttctccatggtggccggcagcagcagtgggggcgaccgctcacctacccgcatgctggcctcttgcaccagcagcgctgcctctgtcgccgccggcaacctcatgaaccccagcctgggcggccagagtgatggcgtggaggccgacggcagccacagcaactcacccacggccctgagcacgccaggccgcatggatgaggccgtgtggcggccctactgaccgccctggtggactcctcccgctggaggcggggaccctaacaaccttcaagaccagtgatgggccggctccgaggctccgggcgggaatgggacctgcgctccagggtggtctcggtcccagggtggtcccagctggtgggagcctctggctgcatctgtgcagccacatccttgtacagaggcataggttaccacccccaccccggcccgggatactgcccccggcccagatcctggccgtctcatcccatacttctgtggggaatcagcctcctgccacccccccggaaggacctcactgtctccagctatgcccagtgctgcatgggacccatgtctcctgggacagaggccatctctcttccagagagaggcagcattggcccacaggataagcctcaggccctgggaaacctcccgacccctgcaccttcgttggagcccctgcatcccctgggtccagccccctctgcatttacacagatttgagtcagaactggaaagtgtcccccacccccaccaccctcgagcggggttcccctcattgtacagatggggcaggacccagcacgctgctggcagagatggtttgagaacacatccaagccagtccccccagcccagcttcccctccgttcctaactgttggctttcccccagccgcacggtcccaggcccagagaagatgagtctatggcatcaggttcttaaaccaggaaagcacctacagaccggctcctccatgcactttaccagctcaacgcatccactctctgttctcttggcagggcgggggaggggggataggaggtcccctttcccctaggtggtctcataattccatttgtggagagaacaggagggccagatagataggtcctagcagaaggcattgaggtgagggatcattttgggtcagacatcaatgtccctgtcccccctgggtccagccaagctgtgccccatcccccaagcctcctgggaggatccagccaaatcttgcgactcctggcacacacctgtctgtaacctgttttgtgctctgaaagcaaatagtcctgagcaaaaaaaaaaaaaaaaaacaaaaaaacaaaaaaaaaacaaaacagtttttaaaactgattttagaaaaagaagcttaatctaacgttttcaaacacaaggtctcttacaggtatagttccgtgattatgatagctctgtgattataagcaacatccccgccccctctcccccccgcggacccccagctgcctcctgagggtgtggggttattagggtctcaatactttctcaaggggctacactccccatcaggcagcatcccaccagcctgcaccacaggctcccctgggaggacgagggaaacgctgatgagacgctgggcatctctcctctgtggctctaggacatctgtccaggaggctgggcggaggtgggcaggatgtgagaggtggggagtactggctgtgcgtggcaggacagaagcactgtaaagggctctccagcgcagctcagctgcactgcgttccgaggtgaagtcttgcccctgaattttgcaaaatgggaaagtgggcgcttgccaagggccaggctgcatggattctcacatcagagttctctggccctagaaaggcttagaaaaggcgtaagggaactcataaaggctagcagcatgcggtattttaactttctgcctcggcctctgtggatgcagaaatctgccctacaaaatgctcttcattggttgtctctgtgagagcactgtccccacccaacctgtcacaacggccagaaccatacaccagagacacactggcaggttaggcagtccttctggtgatcctattccattccctcctgctgcggtttctcttggcctgtcctcactggaaaaacagtctccatctcctcaaaatagttgctgactccctgcacccaaggggcctctccatgccttcttaggaagcagctatgaatccattgtccttgtagtttcttccctcctgttctctggttatagctggtcccaggtcagcgtgggaggcacctttgggttcccagtgcccagcactttgtagtctcatcccagattactaacccttcctgatcctggagaggcagggatagtaaataaattgctcttcctaccccatcccccatcccctgacaaaaagtgacggcagccgtactgagtctgtaaggcccaaagtgggtacagacagcctgggctggtaaaagtaggtccttatttacaaggctgcgttaaagttgtactaggcaaacacactgatgtaggaagcacgaggaaaggaagacgttttgatatagtgttactgtgagcctgtcagtagtgggtaccaatcttttgtgacatattgtcatgctgaggtgtgacacctgctgcactcatctgatgtaaaaccatcccagagctggcgagaggatggagctgggtggaaactgctttgcactatcgtttgcttggtgtttgtttttaacgcacaacttgcttgtacagtaaactgtcttctgtactatttaactgta

SEQ ID NO: 80 - DNA, 4828 bp, Homo sapiens
agtggcgtcggaactgcaaagcacctgtgagcttgcggaagtcagttcagactccagcccgctccagcccggcccgacccgaccgcacccggcgcctgccctcgctcggcgtccccggccagccatgggcccttggagccgcagcctctcggcgctgctgctgctgctgcaggtctcctcttggctctgccaggagccggagccctgccaccctggctttgacgccgagagctacacgttcacggtgccccggcgccacctggagagaggccgcgtcctgggcagagtgaattttgaagattgcaccggtcgacaaaggacagcctatttttccctcgacacccgattcaaagtgggcacagatggtgtgattacagtcaaaaggcctctacggtttcataacccacagatccatttcttggtctacgcctgggactccacctacagaaagttttccaccaaagtcacgctgaatacagtggggcaccaccaccgccccccgccccatcaggcctccgtttctggaatccaagcagaattgctcacatttcccaactcctctcctggcctcagaagacagaagagagactgggttattcctcccatcagctgcccagaaaatgaaaaaggcccatttcctaaaaacctggttcagatcaaatccaacaaagacaaagaaggcaaggttttctacagcatcactggccaaggagctgacacaccccctgttggtgtctttattattgaaagagaaacaggatggctgaaggtgacagagcctctggatagagaacgcattgccacatacactctcttctctcacgctgtgtcatccaacgggaatgcagttgaggatccaatggagattttgatcacggtaaccgatcagaatgacaacaagcccgaattcacccaggaggtctttaaggggtctgtcatggaaggtgctcttccaggaacctctgtgatggaggtcacagccacagacgcggacgatgatgtgaacacctacaatgccgccatcgcttacaccatcctcagccaagatcctgagctccctgacaaaaatatgttcaccattaacaggaacacaggagtcatcagtgtggtcaccactgggctggaccgagagagtttccctacgtataccctggtggttcaagctgctgaccttcaaggtgaggggttaagcacaacagcaacagctgtgatcacagtcactgacaccaacgataatcctccgatcttcaatcccaccacgtacaagggtcaggtgcctgagaacgaggctaacgtcgtaatcaccacactgaaagtgactgatgctgatgcccccaataccccagcgtgggaggctgtatacaccatattgaatgatgatggtggacaatttgtcgtcaccacaaatccagtgaacaacgatggcattttgaaaacagcaaagggcttggattttgaggccaagcagcagtacattctacacgtagcagtgacgaatgtggtaccttttgaggtctctctcaccacctccacagccaccgtcaccgtggatgtgctggatgtgaatgaagcccccatctttgtgcctcctgaaaagagagtggaagtgtccgaggactttggcgtgggccaggaaatcacatcctacactgcccaggagccagacacatttatggaacagaaaataacatatcggatttggagagacactgccaactggctggagattaatccggacactggtgccatttccactcgggctgagctggacagggaggattttgagcacgtgaagaacagcacgtacacagccctaatcatagctacagacaatggttctccagttgctactggaacagggacacttctgctgatcctgtctgatgtgaatgacaacgcccccataccagaacctcgaactatattcttctgtgagaggaatccaaagcctcaggtcataaacatcattgatgcagaccttcctcccaatacatctcccttcacagcagaactaacacacggggcgagtgccaactggaccattcagtacaacgacccaacccaagaatctatcattttgaagccaaagatggccttagaggtgggtgactacaaaatcaatctcaagctcatggataaccagaataaagaccaagtgaccaccttagaggtcagcgtgtgtgactgtgaaggggccgccggcgtctgtaggaaggcacagcctgtcgaagcaggattgcaaattcctgccattctggggattcttggaggaattcttgctttgctaattctgattctgctgctcttgctgtttcttcggaggagagcggtggtcaaagagcccttactgcccccagaggatgacacccgggacaacgtttattactatgatgaagaaggaggcggagaagaggaccaggactttgacttgagccagctgcacaggggcctggacgctcggcctgaagtgactcgtaacgacgttgcaccaaccctcatgagtgtcccccggtatcttccccgccctgccaatcccgatgaaattggaaattttattgatgaaaatctgaaagcggctgatactgaccccacagccccgccttatgattctctgctcgtgtttgactatgaaggaagcggttccgaagctgctagtctgagctccctgaactcctcagagtcagacaaagaccaggactatgactacttgaacgaatggggcaatcgcttcaagaagctggctgacatgtacggaggcggcgaggacgactaggggactcgagagaggcgggccccagacccatgtgctgggaaatgcagaaatcacgttgctggtggtttttcagctcccttcccttgagatgagtttctggggaaaaaaaagagactggttagtgatgcagttagtatagctttatactctctccactttatagctctaataagtttgtgttagaaaagtttcgacttatttcttaaagcttttttttttttcccatcactctttacatggtggtgatgtccaaaagatacccaaattttaatattccagaagaacaactttagcatcagaaggttcacccagcaccttgcagattttcttaaggaattttgtctcacttttaaaaagaaggggagaagtcagctactctagttctgttgttttgtgtatataattttttaaaaaaaatttgtgtgcttctgctcattactacactggtgtgtccctctgcctttttttttttttttaagacagggtctcattctatcggccaggctggagtgcagtggtgcaatcacagctcactgcagccttgtcctcccaggctcaagctatccttgcacctcagcctcccaagtagctgggaccacaggcatgcaccactacgcatgactaattttttaaatatttgagacggggtctccctgtgttacccaggctggtctcaaactcctgggctcaagtgatcctcccatcttggcctcccagagtattgggattacagacatgagccactgcacctgcccagctccccaactccctgccattttttaagagacagtttcgctccatcgcccaggcctgggatgcagtgatgtgatcatagctcactgtaacctcaaactctggggctcaagcagttctcccaccagcctcctttttatttttttgtacagatggggtcttgctatgttgcccaagctggtcttaaactcctggcctcaagcaatccttctgccttggccccccaaagtgctgggattgtgggcatgagctgctgtgcccagcctccatgttttaatatcaactctcactcctgaattcagttgctttgcccaagataggagttctctgatgcagaaattattgggctcttttagggtaagaagtttgtgtctttgtctggccacatcttgactaggtattgtctactctgaagacctttaatggcttccctctttcatctcctgagtatgtaacttgcaatgggcagctatccagtgacttgttctgagtaagtgtgttcattaatgtttatttagctctgaagcaagagtgatatactccaggacttagaatagtgcctaaagtgctgcagccaaagacagagcggaactatgaaaagtgggcttggagatggcaggagagcttgtcattgagcctggcaatttagcaaactgatgctgaggatgattgaggtgggtctacctcatctctgaaaattctggaaggaatggaggagtctcaacatgtgtttctgacacaagatccgtggtttgtactcaaagcccagaatccccaagtgcctgcttttgatgatgtctacagaaaatgctggctgagctgaacacatttgcccaattccaggtgtgcacagaaaaccgagaatattcaaaattccaaattttttcttaggagcaagaagaaaatgtggccctaaagggggttagttgaggggtagggggtagtgaggatcttgatttggatctctttttatttaaatgtgaatttcaacttttgacaatcaaagaaaagacttttgttgaaatagctttactgtttctcaagtgttttggagaaaaaaatcaaccctgcaatcactttttggaattgtcttgatttttcggcagttcaagctatatcgaatatagttctgtgtagagaatgtcactgtagttttgagtgtatacatgtgtgggtgctgataattgtgtattttctttgggggtggaaaaggaaaacaattcaagctgagaaaagtattctcaaagatgcatttttataaattttattaaacaattttgttaaaccataaaaaaaaaaaaa

SEQ ID NO: 81 - DNA, 11185 bp, Homo sapiens
gctgccccgagcctttctggggaagaactccaggcgtgcggacgcaacagccgagaacattaggtgttgtggacaggagctgggaccaagatcttcggccagccccgcatcctcccgcatcttccagcaccgtcccgcaccctccgcatccttccccgggccaccacgcttcctatgtgacccgcctgggcaacgccgaacccagtcgcgcagcgctgcagtgaattttccccccaaactgcaataagccgccttccaaggccaagatgttcataaatataaagagcatcttatggatgtgttcaaccttaatagtaacccatgcgctacataaagtcaaagtgggaaaaagcccaccggtgaggggctccctctctggaaaagtcagcctaccttgtcatttttcaacgatgcctactttgccacccagttacaacaccagtgaatttctccgcatcaaatggtctaagattgaagtggacaaaaatggaaaagatttgaaagagactactgtccttgtggcccaaaatggaaatatcaagattggtcaggactacaaagggagagtgtctgtgcccacacatcccgaggctgtgggcgatgcctccctcactgtggtcaagctgctggcaagtgatgcgggtctttaccgctgtgacgtcatgtacgggattgaagacacacaagacacggtgtcactgactgtggatggggttgtgtttcactacagggcggcaaccagcaggtacacactgaattttgaggctgctcagaaggcttgtttggacgttggggcagtcatagcaactccagagcagctctttgctgcctatgaagatggatttgagcagtgtgacgcaggctggctggctgatcagactgtcagatatcccatccgggctcccagagtaggctgttatggagataagatgggaaaggcaggagtcaggacttatggattccgttctccccaggaaacttacgatgtgtattgttatgtggatcatctggatggtgatgtgttccacctcactgtccccagtaaattcaccttcgaggaggctgcaaaagagtgtgaaaaccaggatgccaggctggcaacagtgggggaactccaggcggcatggaggaacggctttgaccagtgcgattacgggtggctgtcggatgccagcgtgcgccaccctgtgactgtggccagggcccagtgtggaggtggtctacttggggtgagaaccctgtatcgttttgagaaccagacaggcttccctccccctgatagcagatttgatgcctactgctttaaacctaaagaggctacaaccatcgatttgagtatcctcgcagaaactgcatcacccagtttatccaaagaaccacaaatggtttctgatagaactacaccaatcatccctttagttgatgaattacctgtcattccaacagagttccctcccgtgggaaatattgtcagttttgaacagaaagccacagtccaacctcaggctatcacagatagtttagccaccaaattacccacacctactggcagtaccaagaagccctgggatatggatgactactcaccttctgcttcaggacctcttggaaagctagacatatcagaaattaaggaagaagtgctccagagtacaactggcgtctctcattatgctacggattcatgggatggtgtcgtggaagataaacaaacacaagaatcggttacacagattgaacaaatagaagtgggtcctttggtaacatctatggaaatcttaaagcacattccttccaaggaattccctgtaactgaaacaccattggtaactgcaagaatgatcctggaatccaaaactgaaaagaaaatggtaagcactgtttctgaattggtaaccacaggtcactatggattcaccttgggagaagaggatgatgaagacagaacacttacagttggatctgatgagagcaccttgatctttgaccaaattcctgaagtcattacggtgtcaaagacttcagaagacaccatccacactcatttagaagacttggagtcagtctcagcatccacaactgtttcccctttaattatgcctgataataatggatcatccatggatgactgggaagagagacaaactagtggtaggataacggaagagtttcttggcaaatatctgtctactacaccttttccatcacagcatcgtacagaaatagaattgtttccttattctggtgataaaatattagtagagggaatttccacagttatttatccttctctacaaacagaaatgacacatagaagagaaagaacagaaacactaataccagagatgagaacagatacttatacagatgaaatacaagaagagatcactaaaagtccatttatgggaaaaacagaagaagaagtcttctctgggatgaaactctctacatctctctcagagccaattcatgttacagagtcttctgtggaaatgaccaagtcttttgatttcccaacattgataacaaagttaagtgcagagccaacagaagtaagagatatggaggaagactttacagcaactccaggtactacaaaatatgatgaaaatattacaacagtgcttttggcccatggtactttaagtgttgaagcagccactgtatcaaaatggtcatgggatgaagataatacaacatccaagcctttagagtctacagaaccttcagcctcttcaaaattgccccctgccttactcacaactgtggggatgaatggaaaggataaagacatcccaagtttcactgaagatggagcagatgaatttactcttattccagatagtactcaaaagcagttagaggaggttactgatgaagacatagcagcccatggaaaattcacaattagatttcagccaactacatcaactggtattgcagaaaagtcaactttgagagattctacaactgaagaaaaagttccacctatcacaagcactgaaggccaagtttatgcaaccatggaaggaagtgctttgggtgaagtagaagatgtggacctctctaagccagtatctactgttccccaatttgcacacacttcagaggtggaaggattagcatttgttagttatagtagcacccaagagcctactacttatgtagactcttcccataccattcctctttctgtaattcccaagacagactggggagtgttagtaccttctgttccatcagaagatgaagttctaggtgaaccctctcaagacatacttgtcattgatcagactcgccttgaagcgactatttctccagaaactatgagaacaacaaaaatcacagagggaacaactcaggaagaattcccttggaaagaacagactgcagagaaaccagttcctgctctcagttctacagcttggactcccaaggaggcagtaacaccactggatgaacaagagggcgatggatcagcatatacagtctctgaagatgaattgttgacaggttctgagagggtcccagttttagaaacaactccagttggaaaaattgatcacagtgtgtcttatccaccaggtgctgtaactgagcacaaagtgaaaacagatgaagtggtaacactaacaccacgcattgggccaaaagtatctttaagtccagggcctgaacaaaaatatgaaacagaaggtagtagtacaacaggatttacatcatctttgagtccttttagtacccacattacccagcttatggaagaaaccactactgagaaaacatccctagaggatattgatttaggctcaggattatttgaaaagcccaaagccacagaactcatagaattttcaacaatcaaagtcacagttccaagtgatattaccactgccttcagttcagtagacagacttcacacaacttcagcattcaagccatcttccgcgatcactaagaaaccacctctcatcgacagggaacctggtgaagaaacaaccagtgacatggtaatcattggagaatcaacatctcatgttcctcccactacccttgaagatattgtagccaaggaaacagaaaccgatattgatagagagtatttcacgacttcaagtcctcctgctacacagccaacaagaccacccactgtggaagacaaagaggcctttggacctcaggcgctttctacgccacagcccccagcaagcacaaaatttcaccctgacattaatgtttatattattgaggtcagagaaaataagacaggtcgaatgagtgatttgagtgtaattggtcatccaatagattcagaatctaaagaagatgaaccttgtagtgaagaaacagatccagtgcatgatctaatggctgaaattttacctgaattccctgacataattgaaatagacctataccacagtgaagaaaatgaagaagaagaagaagagtgtgcaaatgctactgatgtgacaaccaccccatctgtgcagtacataaatgggaagcatctcgttaccactgtgcccaaggacccagaagctgcagaagctaggcgtggccagtttgaaagtgttgcaccttctcagaatttctcggacagctctgaaagtgatactcatccatttgtaatagccaaaacggaattgtctactgctgtgcaacctaatgaatctacagaaacaactgagtctcttgaagttacatggaagcctgagacttaccctgaaacatcagaacatttttcaggtggtgagcctgatgttttccccacagtcccattccatgaggaatttgaaagtggaacagccaaaaaaggggcagaatcagtcacagagagagatactgaagttggtcatcaggcacatgaacatactgaacctgtatctctgtttcctgaagagtcttcaggagagattgccattgaccaagaatctcagaaaatagcctttgcaagggctacagaagtaacatttggtgaagaggtagaaaaaagtacttctgtcacatacactcccactatagttccaagttctgcatcagcatatgtttcagaggaagaagcagttaccctaataggaaatccttggccagatgacctgttgtctaccaaagaaagctgggtagaagcaactcctagacaagttgtagagctctcagggagttcttcgattccaattacagaaggctctggagaagcagaagaagatgaagatacaatgttcaccatggtaactgatttatcacagagaaatactactgatacactcattactttagacactagcaggataatcacagaaagcttttttgaggttcctgcaaccaccatttatccagtttctgaacaaccttctgcaaaagtggtgcctaccaagtttgtaagtgaaacagacacttctgagtggatttccagtaccactgttgaggaaaagaaaaggaaggaggaggagggaactacaggtacggcttctacatttgaggtatattcatctacacagagatcggatcaattaattttaccctttgaattagaaagtccaaatgtagctacatctagtgattcaggtaccaggaaaagttttatgtccttgacaacaccaacacagtctgaaagggaaatgacagattctactcctgtctttacagaaacaaatacattagaaaatttgggggcacagaccactgagcacagcagtatccatcaacctggggttcaggaagggctgaccactctcccacgtagtcctgcctctgtctttatggagcagggctctggagaagctgctgccgacccagaaaccaccactgtttcttcattttcattaaacgtagagtatgcaattcaagccgaaaaggaagtagctggcactttgtctccgcatgtggaaactacattctccactgagccaacaggactggttttgagtacagtaatggacagagtagttgctgaaaatataacccaaacatccagggaaatagtgatttcagagcgattaggagaaccaaattatggggcagaaataaggggcttttccacaggttttcctttggaggaagatttcagtggtgactttagagaatactcaacagtgtctcatcccatagcaaaagaagaaacggtaatgatggaaggctctggagatgcagcatttagggacacccagacttcaccatctacagtacctacttcagttcacatcagtcacatatctgactcagaaggacccagtagcaccatggtcagcacttcagccttcccctgggaagagtttacatcctcagctgagggctcaggtgagcaactggtcacagtcagcagctctgttgttccagtgcttcccagtgctgtgcaaaagttttctggtacagcttcctccattatcgacgaaggattgggagaagtgggtactgtcaatgaaattgatagaagatccaccattttaccaacagcagaagtggaaggtacgaaagctccagtagagaaggaggaagtaaaggtcagtggcacagtttcaacaaactttccccaaactatagagccagccaaattatggtctaggcaagaagtcaaccctgtaagacaagaaattgaaagtgaaacaacatcagaggaacaaattcaagaagaaaagtcatttgaatcccctcaaaactctcctgcaacagaacaaacaatctttgattcacagacatttactgaaactgaactcaaaaccacagattattctgtactaacaacaaagaaaacttacagtgatgataaagaaatgaaggaggaagacacttctttagttaacatgtctactccagatccagatgcaaatggcttggaatcttacacaactctccctgaagctactgaaaagtcacattttttcttagctactgcattagtaactgaatctataccagctgaacatgtagtcacagattcaccaatcaaaaaggaagaaagtacaaaacattttccgaaaggcatgagaccaacaattcaagagtcagatactgagctcttattctctggactgggatcaggagaagaagttttacctactctaccaacagagtcagtgaattttactgaagtggaacaaatcaataacacattatatccccacacttctcaagtggaaagtacctcaagtgacaaaattgaagactttaacagaatggaaaatgtggcaaaagaagttggaccactcgtatctcaaacagacatctttgaaggtagtgggtcagtaaccagcacaacattaatagaaattttaagtgacactggagcagaaggacccacggtggcacctctccctttctccacggacatcggacatcctcaaaatcagactgtcaggtgggcagaagaaatccagactagtagaccacaaaccataactgaacaagactctaacaagaattcttcaacagcagaaattaacgaaacaacaacctcatctactgattttctggctagagcttatggttttgaaatggccaaagaatttgttacatcagcaccaaaaccatctgacttgtattatgaaccttctggagaaggatctggagaagtggatattgttgattcatttcacacttctgcaactactcaggcaaccagacaagaaagcagcaccacatttgtttctgatgggtccctggaaaaacatcctgaggtgccaagcgctaaagctgttactgctgatggattcccaacagtttcagtgatgctgcctcttcattcagagcagaacaaaagctcccctgatccaactagcacactgtcaaatacagtgtcatatgagaggtccacagacggtagtttccaagaccgtttcagggaattcgaggattccaccttaaaacctaacagaaaaaaacccactgaaaatattatcatagacctggacaaagaggacaaggatttaatattgacaattacagagagtaccatccttgaaattctacctgagctgacatcggataaaaatactatcatagatattgatcatactaaacctgtgtatgaagacattcttggaatgcaaacagatatagatacagaggtaccatcagaaccacatgacagtaatgatgaaagtaatgatgacagcactcaagttcaagagatctatgaggcagctgtcaacctttctttaactgaggaaacatttgagggctctgctgatgttctggctagctacactcaggcaacacatgatgaatcaatgacttatgaagatagaagccaactagatcacatgggctttcacttcacaactgggatccctgctcctagcacagaaacagaattagacgttttacttcccacggcaacatccctgccaattcctcgtaagtctgccacagttattccagagattgaaggaataaaagctgaagcaaaagccctggatgacatgtttgaatcaagcactttgtctgatggtcaagctattgcagaccaaagtgaaataataccaacattgggccaatttgaaaggactcaggaggagtatgaagacaaaaaacatgctggtccttcttttcagccagaattctcttcaggagctgaggaggcattagtagaccatactccctatctaagtattgctactacccaccttatggatcagagtgtaacagaggtgcctgatgtgatggaaggatccaatcccccatattacactgatacaacattagcagtttcaacatttgcgaagttgtcttctcagacaccatcatctcccctcactatctactcaggcagtgaagcctctggacacacagagatcccccagcccagtgctctgccaggaatagacgtcggctcatctgtaatgtccccacaggattcttttaaggaaattcatgtaaatattgaagcaactttcaaaccatcaagtgaggaataccttcacataactgagcctccctctttatctcctgacacaaaattagaaccttcagaagatgatggtaaacctgagttattagaagaaatggaagcttctcccacagaacttattgctgtggaaggaactgagattctccaagatttccaaaacaaaaccgatggtcaagtttctggagaagcaatcaagatgtttcccaccattaaaacacctgaggctggaactgttattacaactgccgatgaaattgaattagaaggtgctacacagtggccacactctacttctgcttctgccacctatggggtcgaggcaggtgtggtgccttggctaagtccacagacttctgagaggcccacgctttcttcttctccagaaataaaccctgaaactcaagcagctttaatcagagggcaggattccacgatagcagcatcagaacagcaagtggcagcgagaattcttgattccaatgatcaggcaacagtaaaccctgtggaatttaatactgaggttgcaacaccaccattttcccttctggagacttctaatgaaacagatttcctgattggcattaatgaagagtcagtggaaggcacggcaatctatttaccaggacctgatcgctgcaaaatgaacccgtgccttaacggaggcacctgttatcctactgaaacttcctacgtatgcacctgtgtgccaggatacagcggagaccagtgtgaacttgattttgatgaatgtcactctaatccctgtcgtaatggagccacttgtgttgatggttttaacacattcaggtgcctctgccttccaagttatgttggtgcactttgtgagcaagataccgagacatgtgactatggctggcacaaattccaagggcagtgctacaaatactttgcccatcgacgcacatgggatgcagctgaacgggaatgccgtctgcagggtgcccatctcacaagcatcctgtctcacgaagaacaaatgtttgttaatcgtgtgggccatgattatcagtggataggcctcaatgacaagatgtttgagcatgacttccgttggactgatggcagcacactgcaatacgagaattggagacccaaccagccagacagcttcttttctgctggagaagactgtgttgtaatcatttggcatgagaatggccagtggaatgatgttccctgcaattaccatctcacctatacgtgcaagaaaggaacagttgcttgcggccagccccctgttgtagaaaatgccaagacctttggaaagatgaaacctcgttatgaaatcaactccctgattagataccactgcaaagatggtttcattcaacgtcaccttccaactatccggtgcttaggaaatggaagatgggctatacctaaaattacctgcatgaacccatctgcataccaaaggacttattctatgaaatactttaaaaattcctcatcagcaaaggacaattcaataaatacatccaaacatgatcatcgttggagccggaggtggcaggagtcgaggcgctgatccctaaaatggcgaacatgtgttttcatcatttcagccaaagtcctaacttcctgtgcctttcctatcacctcgagaagtaattatcagttggtttggatttttggaccaccgttcagtcattttgggttgccgtgctcccaaaacattttaaatgaaagtattggcattcaaaaagacagcagacaaaatgaaagaaaatgagagcagaaagtaagcatttccagcctatctaatttctttagttttctatttgcctccagtgcagtccatttcctaatgtataccagcctactgtactatttaaaatgctcaatttcagcaccgatggccatgtaaataagatgatttaatgttgattttaatcctgtatataaaataaaaagtcacaatgagtttgggcatatttaatgatgattatggagccttagaggtctttaatcattggttcggctgcttttatgtagtttaggctggaaatggtttcacttgctctttgactgtcagcaagactgaagatggcttttcctggacagctagaaaacacaaaatcttgtaggtcattgcacctatctcagccataggtgcagtttgcttctacatgatgctaaaggctgcgaatgggatcctgatggaactaaggactccaatgtcgaactcttctttgctgcattcctttttcttcacttacaagaaaggcctgaatggaggacttttctgtaaccagg

SEQ ID NO: 82 - DNA, 2124 bp, Homo sapiens
attccgctcttgctttccggcaggtgatggcgccccccgcggcctagaggtccagcgcccgccgcgagcagcggacagtcctcctgttgtgtccgaccgagagtcctggtgactttgaacatgctggtgccgctagccaagctgtcctgcctggcatatcagtgctttcatgccttaaaaattaagaaaaattatctacctctatgtgctataagatggtcttcaacttctactgtgcctcgaattactacccattatactatttatccccgggataaggacaagagatgggaaggagtgaacatggaaaggtttgcagaagaagcagatgttgtaatagttggtgcaggccctgcagggctctctgcagctgttcgtctaaaacagttggctgtggcacatgaaaaggacatccgtgtgtgtctagtggagaaagctgcccagataggagctcatactctctcaggggcttgccttgatccaggtgcttttaaagaactcttcccagactggaaagagaagggggctccacttaacactcctgtaacagaagacagatttggaattttaacagagaaatacagaattcctgtgccaattcttccagggcttccaatgaataatcatggcaattacattgtacgcttgggacatttagtgagctggatgggcgaacaagcagaagcccttggtgttgaagtataccctggttatgcagctgctgaggtcctttttcatgatgatggtagtgtaaaaggaattgccactaacgatgtagggatacaaaaggatggtgcaccaaaggcaacatttgagagaggactggaactacatgctaaagtcacaatttttgcagaaggttgccatggacatctagccaagcaactatataagaagtttgatttgagagcaaattgtgaacctcaaacctacgggattggactgaaggagttatgggttattgatgaaaagaactggaaacctgggagagtagatcacactgttggttggcccttggacagacatacctatggaggatctttcctctatcatttgaatgaaggtgaacccctagtagctcttggtcttgtggttggtctagactatcagaatccatacctgagtccatttagagagttccaaaggtggaaacaccatcctagcattcggccaaccttggaaggtggaaaaaggattgcatacggagccagagctctcaatgaaggtggctttcagtctataccaaaactcacctttcctggtggtttactaattggttgtagtcctggttttatgaatgttcccaagatcaaaggtactcacacagcaatgaaaagtggaattttagcagcagaatctatttttaatcaactaactagtgaaaatctccaatcaaagacaataggactccatgtaactgaatatgaggacaatttgaagaactcatgggtatggaaagagctatattctgttagaaatataagaccgtcctgccacggagtactgggtgtatatggagggatgatttacactggaatcttttactggatattgagaggaatggagccgtggactctgaaacataaaggttctgactttgaacggctcaagccagccaaggattgcacacctattgagtatccaaaacccgatggacagatcagttttgacctcttgtcatctgtggctctgagtggtactaatcatgaacatgaccagccggcacacttaaccttaagggatgacagtatacctgtaaatagaaatctgtcgatatatgatgggcccgagcagcgattctgtcctgcaggagtttatgaatttgtacctgtggaacaaggtgatggatttcggttacagataaatgctcagaactgtgtacattgtaaaacatgtgatattaaagatccaagtcagaatattaactgggtggtacctgaaggtggaggaggacctgcttacaatggaatgtaaactgcagctagccagtttctttcaagtatggcaagctaacgttaaaatgtttagagattaacagatttcagaatgtctttctgcatattactgaacagaatagtcacaaaatgattatcaaataaaaattttatactataaaaaaaaaaa

SEQ ID NO: 83 - DNA, 2143 bp, Homo sapiens
ggtaagagtcgcgtagcccgagccgggcggaaccactgttcgcgctgccgtgtttccgggcggggacactcagggcgcgacgcttttctgttacccacagaggcccgccgcggctgcgccatccgcggccatgaagtttcgggccaagatcgtggacggggcctgtctgaaccacttcacacgaatcagtaacatgatagccaagcttgccaaaacctgcaccctccgcatcagccctgataagcttaacttcatcctttgtgacaagctggctaatggaggagtgagcatgtggtgtgagctggaacaggagaacttcttcaacgaatttcaaatggagggtgtctctgcagaaaacaatgagatttatttagagctaacatcggaaaacttatctcgagccttgaagactgcccagaatgccagggctttgaaaatcaaactgactaataaacactttccctgcctcacggtctccgtggagctgttatctatgtcaagcagtagccgcattgtgacccatgacatccccataaaggtgattcctaggaaattgtggaaggacttacaagaaccggtggtcccagatcctgatgttagtatttatttaccagtcttgaagactatgaagagtgttgtggaaaaaatgaaaaacatcagcaatcaccttgttattgaagcaaacctagatggagaattgaatttgaaaatagaaactgaattagtatgtgttacaactcattttaaagatcttggaaatcctccattagcctctgaaagcacccatgaggacagaaacgtggaacacatggctgaagtgcacatagatattaggaagctcctacagtttcttgctggacaacaagtaaatcccacaaaggccttatgcaatattgtgaataacaagatggtgcattttgatctgcttcatgaagacgtgtcccttcagtatttcatccctgcgctgtcctagcaccctgtcgctggagttggcatgcagagactttgtcaggatgggagaggccgcaggtgttgtgttctgatcactggtctgtgccctcacagcaccgcacatcgacacactgtacttatttgtccctctctaacattttaactaaaagttgattcaacaacacacagttggataaacatatcacttcatgttgctcatgtctgttttgctttgtttttaagacactgaaaagaaaagctagaatttatttattcagactttaaagaacaatttctcattgatgttgtgaaaatcgtcatgtatttagacttggtgtagtagccagaattcgtaaagctgttgcctgggagcttggtactttccctccaggcagaggctctagctcagcacggcctgtagcgcacagtcagtcttgcatttcagtgtgttcaccccgctgctcctgccccttggagcccagtgacagaaagaacagcctctgtcaccccgccgccactgccttggttactcagagcactgtggggtgtcacagctgcagcatttggagtctctctcttgctgaggactcaagcccacctgagtccactcccctcttgatgcctagagagctggcccagccaacacagctcttagctgggagctccttctgccattccaactagtttcttcctggggccagttttgggtttaggttgtaattccttatatttctttcttccacagtgtatcggatctgtcgttctggaaagaagacccttctatttagagtagaaacaaacgaaacttctaaggtatcatctgtgttaagtgatgagaccatatttctttgatgtttctgaacatcaaagctgattcagtactggtagatgtgctcattctccctgaaacatacccatcatatttcctattataattacatctcattgtcctgtggaggtggacatgataaacattatcttttgttttcttgttttgttttgtttgagacggtctcattctgtcacccagactggagtgcagtgccacaatcatggctcaccgcattgacctccttggctcaaggcatcctcccacctcagcttcctgactagctgggactactggtgtgcaccaccacacccagctaattttcaatttttcatagagacagggtctcactgtgttgtccag

SEQ ID NO: 84 - DNA, 1393 bp, Homo sapiens
gaccagggccggcgagcgcagtgcagcgccgcgcggtgcgggcggccgagtgggggcgtcatggaggatgagcggagcttttcggatatctgcggcggccgcctggcgctgcagcgccgctactactccccgtcctgccgggaattctgcctcagctgccctcggctctcgctgcgttcgctcaccgctgtcacctgcacggtgtggctggcggcctacggactcttcaccctctgcgagaacagcatgatcctctctgctgccatcttcatcaccctcttaggtctgcttggttatctccattttgtgaagattgatcaggagactctgttaatcattgattcccttggcattcagatgacttcatcttatgcttcaggcaaagaaagcactaccttcatagaaatgggcaaggtcaaggatattgtcatcaatgaggccatttacatgcagaaggtgatttactacctctgcatcttattgaaagatccagtggaaccacatgggatatcccaagtagtacccgtcttccagagtgccaagccccggctggactgcttgattgaagtatacaggagctgccaggagatcctggcacaccagaaagccacatcaacaagcccatgagccccagcgttcagaaggccagcattgtcttccatgggagatgactcttaagccataggggctggttttccgtactccaaaccatcaggtggacacagtcctaggaaccattatggatgtagtgcatcttagagccatagagcaggtgactggaaatctaactcagtatatttccgtgtattatagtgttttccttgtaaggttttgcctactttaccaaaggaggggagaccttaagaattttgacacagtatgtcaaaagtaatgtcagcaaagaacactttcggaaattgctaagcatgttcaggtttactttgttgatgtttgtgaagcaaaacaatgggaaactgacatcagatgtcttgagaaagctatattttccaatagtaccccttgtgtaaagttacgaaaaaaacaagcccttcagtactggttagcaggaagaaatgtcctacaaaagacgagtctgtcaacctagtgcctgtgttctgtacagggcttatttatttactgttaataaacagatcttccaaaacacacagttacctggttcacagatagctgctttttattgacaaacaagatcatagtatttcagtcatggtgtcaagcacattaatacttttctgttactcagcatttttttttatatcagttcaaaagctacttttgccaagaaggatgagacaaaaggccagacagaaattggactttggttttcagacatgggactctcatgttaacaaagaataaataagcaaatatt

SEQ ID NO: 85 - DNA, 2415 bp, Homo sapiens
gtccggcagccgctgctgctgctgctgctgctgctgccgccgccgccgccgccgtccctgcgtccttcggtctctgctcccgggacccgggctccgccgcagccagccagcatgtcggggatcaagaagcaaaagacggagaaccagcagaaatccaccaatgtagtctatcaggcccaccatgtgagcaggaataagagagggcaagtggttggaacaaggggtgggttccgaggatgtaccgtgtggctaacaggtctctctggtgctggaaaaacaacgataagttttgccctggaggagtaccttgtctcccatgccatcccttgttactccctggatggggacaatgtccgtcatggccttaacagaaatctcggattctctcctggggacagagaggaaaatatccgccggattgctgaggtggctaagctgtttgctgatgctggtctggtctgcattaccagctttatttctccattcgcaaaggatcgtgagaatgcccgcaaaatacatgaatcagcagggctgccattctttgaaatatttgtagatgcacctctaaatatttgtgaaagcagagacgtaaaaggcctctataaaagggccagagctggggagattaaaggatttacaggtattgattctgattatgagaaacctgaaactcctgagcgtgtgcttaaaaccaatttgtccacagtgagtgactgtgtccaccaggtagtggaacttctgcaagagcagaacattgtaccctatactataatcaaagatatccacgaactctttgtgccggaaaacaaacttgaccacgtccgagctgaggctgaaactctcccttcattatcaattactaagctggatctccagtgggtccaggttttgagcgaaggctgggccactcccctcaaaggtttcatgcgggagaaggagtacttacaggttatgcactttgacaccctgctagatgatggcgtgatcaacatgagcatccccattgtactgcccgtctctgcagaggataagacacggctggaagggtgcagcaagtttgtcctggcacatggtggacggagggtagctatcttacgagacgctgaattctatgaacacagaaaagaggaacgctgttcccgtgtttgggggacaacatgtacaaaacacccccatatcaaaatggtgatggaaagtggggactggctggttggtggagaccttcaggtgctggagaaaataagatggaatgatgggctggaccaataccgtctgacacctctggagctcaaacagaaatgtaaagaaatgaatgctgatgcggtgtttgcattccagttgcgcaatcctgtccacaatggccatgccctgttgatgcaggacactcgccgcaggctcctagagaggggctacaagcacccggtcctcctactacaccctctgggcggctggaccaaggatgacgatgtgcctctagactggcggatgaagcagcacgcggctgtgctcgaggaaggggtcctggatcccaagtcaaccattgttgccatctttccgtctcccatgttatatgctggccccacagaggtccagtggcactgcaggtcccggatgattgcgggtgccaatttctacattgtggggagggaccctgcaggaatgccccatcctgaaaccaagaaggatctgtatgaacccactcatgggggcaaggtcttgagcatggcccctggcctcacctctgtggaaatcattccattccgagtggctgcctacaacaaagccaaaaaagccatggacttctatgatccagcaaggcacaatgagtttgacttcatctcaggaactcgaatgaggaagctcgcccgggaaggagagaatcccccagatggcttcatggcccccaaagcatggaaggtcctgacagattattacaggtccctggagaagaactaagcctttggctccagagtttctttctgaagtgctctttgattaccttttctatttttatgattagatgctttgtattaaattgcttctcaatgatgcattttaatcttttataatgaagtaaaagttgtgtctataattaaaaaaaaatatatatatatacacacacacatatacatacaaagtcaaactgaagaccaaatcttagcaggtaaaagcaatattcttatacatttcataataaaattagctctatgtattttctactgcacctgagcaggcaggtcccagatttcttaaggctttgtttgaccatgtgtctagttacttgctgaaaagtgaatatattttccagcatgtcttgacaacctgtactcttccaatgtcatttatcagttgtaaaatatatcagattgtgtcctcttctgtacaattgacaaaaaaaaaaaaaaaaaaaaaaaa

SEQ ID NO: 86 - DNA, 1868 bp, Homo sapiens
cgcacagggcgcacccggacgctctaccgctcccgccgcagtcgccgggccatgggcctcgagcccgccccgaacccccgcgagcccgccttgtctgcggcgtgactggaggcccagctgccgcccctccctgtgtccttccaagaagtgccacatgcactgatctcttgtgtccccagatggtcatcatgggccagtgctactacaacgagaccatcggcttcttctataacaacagtggcaaagagctcagctcccactggcggcccaaggatgtggtcgtggtggcactggggctgaccgtcagcgtgctggtgctgctgaccaatctgctggtcatagcagccatcgcctccaaccgccgcttccaccagcccatctactacctgctcggcaatctggccgcggctgacctcttcgcgggcgtggcctacctcttcctcatgttccacactggtccccgcacagcccgactttcacttgagggctggttcctgcggcagggcttgctggacacaagcctcactgcgtcggtggccacactgctggccatcgccgtggagcggcaccgcagtgtgatggccgtgcagctgcacagccgcctgccccgtggccgcgtggtcatgctcattgtgggcgtgtgggtggctgccctgggcctggggctgctgcctgcccactcctggcactgcctctgtgccctggaccgctgctcacgcatggcacccctgctcagccgctcctatttggccgtctgggctctgtcgagcctgcttgtcttcctgctcatggtggctgtgtacacccgcattttcttctacgtgcggcggcgagtgcagcgcatggcagagcatgtcagctgccacccccgctaccgagagaccacgctcagcctggtcaagactgttgtcatcatcctgggggcgttcgtggtctgctggacaccaggccaggtggtactgctcctggatggtttaggctgtgagtcctgcaatgtcctggctgtagaaaagtacttcctactgttggccgaggccaactcactggtcaatgctgctgtgtactcttgccgagatgctgagatgcgccgcaccttccgccgccttctctgctgcgcgtgcctccgccagtccacccgcgagtctgtccactatacatcctctgcccagggaggtgccagcactcgcatcatgcttcccgagaacggccacccactgatggactccaccctttagctaccttgaacttcagcggtacgcggcaagcaacaaatccacagcccctgatgacttgtgggtgctcctggctcaacccaaccaacaggactgactgactggcaggacaaggtctggcatggcacagcaccactgccaggcctccccaggcacaccactctgcccagggaatgggggctttgggtcatctcccactgcctgggggagtcagatggggtgcaggaatctggctcttcagccatctcaggtttagggggtttgtaacagacattattctgttttcactgcgtatccttggtaagccctgtggactggttcctgctgtgtgatgctgagggttttaaggtggggagagataagggctctctcgggccatgctacccggtatgactgggtaatgaggacagactgtggacaccccatctacctgagtctgattctttagcagcagagactgaggggtgcagagtgtgagctgggaaaggtttgtggctccttgcagcctccagggactggcctgtccccgatagaattgaagcagtccacggggaggggatgatacaaggagtaaacctttctttacactctaaaaaaaaaaaaaaaaaaaaaaaaaaaaaaaaaaaaaaaaaaaaa

SEQ ID NO: 87 - DNA, 4618 bp, Homo sapiens
gccacgctcgggtcgggggcgggctgacgccgccgccgccgcgggaggagggacaaaggggtgggtccccgcgggtcggcaccccggcggttgggctgcgggtcagagcactgtccggtggtgcccaggaggagtaggagcaggagcagaagcagaagcggggtccggagctgcgcgcctacgcgggacctgtgtccgaaatgccggtgcgaggagaccgcgggtttccaccccggcgggagctgtcaggttggctccgcgccccaggcatggaagagctgatatgggaacagtacactgtgaccctacaaaaggattccaaaagaggatttggaattgcagtgtccggaggcagagacaacccccactttgaaaatggagaaacgtcaattgtcatttctgatgtgctcccgggtgggcctgctgatgggctgctccaagaaaatgacagagtggtcatggtcaatggcacccccatggaggatgtgcttcattcgtttgcagttcagcagctcagaaaaagtgggaaggtcgctgctattgtggtcaagaggccccggaaggtccaggtggccgcacttcaggccagccctcccctggatcaggatgaccgggcttttgaggtgatggacgagtttgatggcagaagtttccggagtggctacagcgagaggagccggctgaacagccatggggggcgcagccgcagctgggaggacagcccggaaagggggcgtccccatgagcgggcccggagccgggagcgggacctcagccgggaccggagccgtggccggagcctggagcggggcctggaccaagaccatgcgcgcacccgagaccgcagccgtggccggagcctggagcggggcctggaccacgactttgggccatcccgggaccgggaccgtgaccgcagccgcggccggagcattgaccaggactacgagcgagcctatcaccgggcctacgacccagactacgagcgggcctacagcccggagtacaggcgcggggcccgccacgatgcccgctctcggggaccccgaagccgcagccgcgagcacccgcactcacggagccccagccccgagcctagggggcggccggggcccatcggggtcctcctgatgaaaagcagagcgaacgaagagtatggtctccggcttgggagtcagatcttcgtaaaggaaatgacccgaacgggtctggcaactaaagatggcaaccttcacgaaggagacataattctcaagatcaatgggactgtaactgagaacatgtctttaacggatgctcgaaaattgatagaaaagtcaagaggaaaactacagctagtggtgttgagagacagccagcagaccctcatcaacatcccgtcattaaatgacagtgactcagaaatagaagatatttcagaaatagagtcaaaccgatcattttctccagaggagagacgtcatcagtattctgattatgattatcattcctcaagtgagaagctgaaggaaaggccaagttccagagaggacacgccgagcagattgtccaggatgggtgcgacacccactccctttaagtccacaggggatattgcaggcacagttgtcccagagaccaacaaggaacccagataccaagaggaccccccagctcctcaaccaaaagcagccccgagaacttttcttcgtcctagtcctgaagatgaagcaatatatggccctaataccaaaatggtaaggttcaagaagggagacagcgtgggcctccggttggctggtggcaatgatgtcgggatatttgttgctggcattcaagaagggacctcggcggagcaggagggccttcaagaaggagaccagattctgaaggtgaacacacaggatttcagaggattagtgcgggaggatgccgttctctacctgttagaaatccctaaaggtgaaatggtgaccattttagctcagagccgagccgatgtgtatagagacatcctggcttgtggcagaggggattcgttttttataagaagccactttgaatgtgagaaggaaactccacagagcctggccttcaccagaggggaggtcttccgagtggtagacacactgtatgacggcaagctgggcaactggctggctgtgaggattgggaacgagttggagaaaggcttaatccccaacaagagcagagctgaacaaatggccagtgttcaaaatgcccagagagacaacgctggggaccgggcagatttctggagaatgcgtggccagaggtctggggtgaagaagaacctgaggaaaagtcgggaagacctcacagctgttgtgtctgtcagcaccaagttcccagcttatgagagggttttgctgcgagaagctggtttcaagagacctgtggtcttattcggccccatagctgatatagcaatggaaaaattggctaatgagttacctgactggtttcaaactgctaaaacggaaccaaaagatgcaggatctgagaaatccactggagtggtccggttaaataccgtgaggcaaattattgaacaggataagcatgcactactggatgtgactccgaaagctgtggacctgttgaattacacccagtggttcccaattgtgatttttttcaacccagactccagacaaggtgtcaaaaccatgagacaaaggttaaatccaacgtccaacaaaagttctcgaaagttatttgatcaagccaacaagcttaaaaaaacgtgtgcacacctttttacagctacaatcaacctaaattcagccaatgatagctggtttggcagcttaaaggacactattcagcatcagcaaggagaagcggtttgggtctctgaaggaaagatggaagggatggatgatgaccccgaagaccgcatgtcctacttaaccgccatgggcgcggactatctgagttgcgacagccgcctcatcagtgactttgaagacacggacggtgaaggaggcgcctacactgacaatgagctggatgagccagccgaggagccgctggtgtcgtccatcacccgctcctcggagccggtgcagcacgaggagagcataaggaaacccagcccagagccacgagctcagatgaggagggctgctagcagcgatcaacttagggacaatagcccgcccccagcattcaagccagagccgcccaaggccaaaacccagaacaaagaagaatcctatgacttctccaaatcctatgaatataagtcaaacccctctgccgttgctggtaatgaaactcctggggcatctaccaaaggttatcctcctcctgttgcagcaaaacctacctttgggcggtctatactgaagccctccactcccatccctcctcaagagggtgaggaggtgggagagagcagtgaggagcaagataatgctcccaaatcagtcctgggcaaagtcaaaatatttgagaagatggatcacaaggccaggttacagagaatgcaggagctccaggaagcacagaatgcaaggatcgaaattgcccagaagcatcctgatatctatgcagttccaatcaaaacgcacaagccagaccctggcacgccccagcacacgagttccagaccccctgagccacagaaagctccttccagaccttatcaggataccagaggaagttatggcagtgatgccgaggaggaggagtaccgccagcagctgtcagaacactccaagcgcggttactatggccagtctgcccgataccgggacacagaattatagatgtctgagcacggactctcccaggcctgcctgcatggcatcagactagccactcctgccaggccgccgggatggttcttctccagttagaatgcaccatggagacgtggtgggactccagctcgtgtgtcctcatggagaacccaggggacagctggtgcaaattcagaactgagggctctgtttgtgggactgggttagaggagtctgtggctttttgttcagaattaagcagaacactgcagtcagatcctgttacttgcttcagtggaccgaaatctgtattctgtttgcgtacttgtaatatgtatattaagaagcaataactatttttcctcattaatagctgccttcaaggactgtttcagtgtgagtcagaatgtgaaaaaggaataaaaaatactgttgggctcaaactaaattcaaagaagtactttattgcaactcttttaagtgccttggatgagaagtgtcttaaattttcttcctttgaagctttaggcagagccataatggactaaaacattttgactaagtttttataccagcttaatagctgtagttttccctgcactgtgtcatcttttcaaggcatttgtctttgtaatattttccataaatttggactgtctatatcataactatacttgatagtttggctataagtgctcaatagcttgaagcccaagaagttggtatcgaaatttgttgtttgtttaaacccaagtgctgcacaaaagcagatacttgaggaaaacactatttccaaaagcacatgtattgacaacagttttataatttaataaaaaggaatacattgcaatccgtaaaaaaaaaaaaaaaaa

SEQ ID NO: 88 - DNA, 1143 bp, Homo sapiens
tgcaacgccggggccagagtcttaaaaccgagggcccgcaggggtccccgcggccgccgcgatgcagaaatacgagaaactggaaaagattggggaaggcacctacggaactgtgttcaaggccaaaaaccgggagactcatgagatcgtggctctgaaacgggtgaggctggatgacgatgatgagggtgtgccgagttccgccctccgggagatctgcctactcaaggagctgaagcacaagaacatcgtcaggcttcatgacgtcctgcacagcgacaagaagctgactttggtttttgaattctgtgaccaggacctgaagaagtattttgacagttgcaatggtgacctcgatcctgagattgtaaagtcattcctcttccagctactaaaagggctgggattctgtcatagccgcaatgtgctacacagggacctgaagccccagaacctgctaataaacaggaatggggagctgaaattggctgattttggcctggctcgagcctttgggattcccgtccgctgttactcagctgaggtggtcacactgtggtaccgcccaccggatgtcctctttggggccaagctgtactccacgtccatcgacatgtggtcagccggctgcatctttgcagagctggccaatgctgggcggcctctttttcccggcaatgatgtcgatgaccagttgaagaggatcttccgactgctggggacgcccaccgaggagcagtggccctctatgaccaagctgccagactataagccctatccgatgtacccggccacaacatccctggtgaacgtcgtgcccaaactcaatgccacagggagggatctgctgcagaaccttctgaagtgtaaccctgtccagcgtatctcagcagaagaggccctgcagcacccctacttctccgacttctgtccgccctaggccccgggacccccggcctccaggctggggcctggcctatttaagccccctcttgagaggggtgagacagtgggggtgcctggtgcgctgtgctccagcagtgctgggcccagccggggtggggtgcctgagcccgaatttctcactccctttgtggactttatttaatttcataaattggctcctttcccacagtcaaaaaa

SEQ ID NO: 89 - DNA, 1295 bp, Homo sapiens
cacgtcagccggggctagaaaaggcggcggggctgggcccagcgaggtgacagcctcgcttggacgcagagcccggcccgacgccgccatgagcgccgcgctcttcagcctggacggcccggcgcgcggcgcgccctggcctgcggagcctgcgcccttctacgaaccgggccgggcgggcaagccgggccgcggggccgagccaggggccctaggcgagccaggcgccgccgcccccgccatgtacgacgacgagagcgccatcgacttcagcgcctacatcgactccatggccgccgtgcccaccctggagctgtgccacgacgagctcttcgccgacctcttcaacagcaatcacaaggcgggcggcgcggggcccctggagcttcttcccggcggccccgcgcgccccttgggcccgggccctgccgctccccgcctgctcaagcgcgagcccgactggggcgacggcgacgcgcccggctcgctgttgcccgcgcaggtggccgcgtgcgcacagaccgtggtgagcttggcggccgcagggcagcccaccccgcccacgtcgccggagccgccgcgcagcagccccaggcagacccccgcgcccggccccgcccgggagaagagcgccggcaagaggggcccggaccgcggcagccccgagtaccggcagcggcgcgagcgcaacaacatcgccgtgcgcaagagccgcgacaaggccaagcggcgcaaccaggagatgcagcagaagttggtggagctgtcggctgagaacgagaagctgcaccagcgcgtggagcagctcacgcgggacctggccggcctccggcagttcttcaagcagctgcccagcccgcccttcctgccggccgccgggacagcagactgccggtaacgcgcggccggggcgggagagactcagcaacgacccatacctcagacccgacggcccggagcggagcgcgccctgccctggcgcagccagagccgccgggtgcccgctgcagtttcttgggacataggagcgcaaagaagctacagcctggacttaccaccactaaactgcgagagaagctaaacgtgtttattttcccttaaattatttttgtaatggtagctttttctacatcttactcctgttgatgcagctaaggtacatttgtaaaaagaaaaaaaaccagacttttcagacaaaccctttgtattgtagataagaggaaaagactgagcatgctcacttttttatattaatttttacagtatttgtaagaataaagcagcatttgaaatcg

SEQ ID NO: 90 - DNA, 2056 bp, Homo sapiens
cgcagcgcagcccagccgagcgtcgcggggccgccccccgccctgccggccgcctcgccgagcctcctggggcgcccgggcccgcgacccccgcacccagctccgcaggaccggcgggcgcgcgcgggctctggaggccacgggcatgatgcttcgggtcctggtgggggctgtcctccctgccatgctactggctgccccaccacccatcaacaagctggcactgttcccagataagagtgcctggtgcgaagccaagaacatcacccagatcgtgggccacagcggctgtgaggccaagtccatccagaacagggcgtgcctaggacagtgcttcagctacagcgtccccaacaccttcccacagtccacagagtccctggttcactgtgactcctgcatgccagcccagtccatgtgggagattgtgacgctggagtgcccgggccacgaggaggtgcccagggtggacaagctggtggagaagatcctgcactgtagctgccaggcctgcggcaaggagcctagtcacgaggggctgagcgtctatgtgcagggcgaggacgggccgggatcccagcccggcacccaccctcacccccatccccacccccatcctggcgggcagacccctgagcccgaggacccccctggggccccccacacagaggaagagggggctgaggactgaggcccccccaactcttcctcccctctcatccccctgtggaatgttgggtctcactctctggggaagtcaggggagaagctgaagcccccctttggcactggatggacttggcttcagactcggacttgaatgctgcccggttgccatggagatctgaaggggcggggttagagccaagctgcacaatttaatatattcaagagtggggggaggaagcagaggtcttcagggctctttttttggggggggtggtctcttcctgtctggcttctagagatgtgcctgtgggagggggaggaagttggctgagccattgagtgctgggggaggccatccaagatggcatgaatcgggctaaggtccctgggggtgcagatggtactgctgaggtcccgggcttagtgtgagcatcttgccagcctcaggcttgagggagggctgggctagaaagaccactggcagaaacaggaggctccggcccacaggtttccccaaggcctctcaccccacttcccatctccagggaagcgtcgccccagtggcactgaagtggccctccctcagcggaggggtttgggagtcaggcctgggcaggaccctgctgactcgtggcgcgggagctgggagccaggctctccgggcctttctctggcttccttggcttgcctggtgggggaaggggaggaggggaagaaggaaagggaagagtcttccaaggccagaaggagggggacaaccccccaagaccatccctgaagacgagcatccccctcctctccctgttagaaatgttagtgccccgcactgtgccccaagttctaggccccccagaaagctgccagagccggccgccttctcccctctcccagggatgctctttgtaaatatcggatgggtgtgggagtgaggggttacctccctcgccccaaggttccagaggccctaggcgggatgggctcgctgaacctcgaggaactccaggacgaggaggacatgggacttgcgtggacagtcagggttcacttgggctctctctagctccccaattctgcctgcctcctccctcccagctgcactttaaccctagaaggtggggacctggggggagggacagggcaggcgggcccatgaagaaagcccctcgttgcccagcactgtctgcgtctgctcttctgtgcccagggtggctgccagcccactgcctcctgcctggggtggcctggccctcctggctgttgcgacgcgggcttctggagcttgtcaccattggacagtctccctgatggaccctcagtcttctcatgaataaattccttcaacgccaaaaaaaaaaaaaaaaaaaaaaaaaaaaaaaaaaaaaaaaaa

SEQ ID NO: 91 - DNA, 5903 bp, Homo sapiens
agacgccgcccaggacgcagccgccgccgccgccgctcctctgccactggctctgcgccccagcccggctctgctgcagcggcagggaggaagagccgccgcagcgcgactcgggagccccgggccacagcctggcctccggagccacccacaggcctccccgggcggcgcccacgctcctaccgcccggacgcgcggatcctccgccggcaccgcagccacctgctcccggcccagaggcgacgacacgatgcgctgcgcgctggcgctctcggcgctgctgctactgttgtcaacgccgccgctgctgccgtcgtcgccgtcgccgtcgccgtcgccctcccagaatgcaacccagactactacggactcatctaacaaaacagcaccgactccagcatccagtgtcaccatcatggctacagatacagcccagcagagcacagtccccacttccaaggccaacgaaatcttggcctcggtcaaggcgaccacccttggtgtatccagtgactcaccggggactacaaccctggctcagcaagtctcaggcccagtcaacactaccgtggctagaggaggcggctcaggcaaccctactaccaccatcgagagccccaagagcacaaaaagtgcagacaccactacagttgcaacctccacagccacagctaaacctaacaccacaagcagccagaatggagcagaagatacaacaaactctggggggaaaagcagccacagtgtgaccacagacctcacatccactaaggcagaacatctgacgacccctcaccctacaagtccacttagcccccgacaacccacttcgacgcatcctgtggccaccccaacaagctcgggacatgaccatcttatgaaaatttcaagcagttcaagcactgtggctatccctggctacaccttcacaagcccggggatgaccaccaccctaccgtcatcggttatctcgcaaagaactcaacagacctccagtcagatgccagccagctctacggccccttcctcccaggagacagtgcagcccacgagcccggcaacggcattgagaacacctaccctgccagagaccatgagctccagccccacagcagcatcaactacccaccgataccccaaaacaccttctcccactgtggctcatgagagtaactgggcaaagtgtgaggatcttgagacacagacacagagtgagaagcagctcgtcctgaacctcacaggaaacaccctctgtgcagggggcgcttcggatgagaaattgatctcactgatatgccgagcagtcaaagccaccttcaacccggcccaagataagtgcggcatacggctggcatctgttccaggaagtcagaccgtggtcgtcaaagaaatcactattcacactaagctccctgccaaggatgtgtacgagcggctgaaggacaaatgggatgaactaaaggaggcaggggtcagtgacatgaagctaggggaccaggggccaccggaggaggccgaggaccgcttcagcatgcccctcatcatcaccatcgtctgcatggcatcattcctgctcctcgtggcggccctctatggctgctgccaccagcgcctctcccagaggaaggaccagcagcggctaacagaggagctgcagacagtggagaatggttaccatgacaacccaacactggaagtgatggagacctcttctgagatgcaggagaagaaggtggtcagcctcaacggggagctgggggacagctggatcgtccctctggacaacctgaccaaggacgacctggatgaggaggaagacacacacctctagtccggtctgccggtggcctccagcagcaccacagagctccagaccaaccaccccaagtgccgtttggatggggaagggaaagactggggagggagagtgaactccgaggggtgtcccctcccaatccccccagggccttaatttttcccttttcaacctgaacaaatcacattctgtccagattcctcttgtaaaataacccactagtgcctgagctcagtgctgctggatgatgagggagatcaagaaaaagccacgtaagggactttatagatgaactagtggaatcccttcattctgcagtgagattgccgagacctgaagagggtaagtgacttgcccaaggtcagagccacttggtgacagagccaggatgagaacaaagattccatttgcaccatgccacactgctgtgttcacatgtgccttccgtccagagcagtcccgggcaggggtgaaactccagcaggtggctgggctggaaaggagggcagggctacatcctggctcggtgggatctgacgacctgaaagtccagctcccaagttttccttctcctaccccagcctcgtgtacccatcttcccaccctctatgttcttacccctccctacactcagtgtttgttcccacttactctgtcctggggcctctgggattagcacaggttattcataaccttgaaccccttgttctggattcggattttctcacatttgcttcgtgagatgggggcttaacccacacaggtctccgtgcgtgaaccaggtctgcttaggggacctgcgtgcaggtgaggagagaaggggacactcgagtccaggctggtatctcagggcagctgatgaggggtcagcaggaacactggcccattgcccctggcactccttgcagaggccacccacgatcttctttgggcttccatttccaccagggactaaaatctgctgtagctagtgagagcagcgtgttccttttgttgttcactgctcagctgatgggagtgattccctgagacccagtatgaaagagcagtggctgcaggagaggccttcccggggccccccatcagcgatgtgtcttcagagacaatccattaaagcagccaggaaggacaggctttcccctgtatatcataggaaactcagggacatttcaagttgctgagagttttgttatagttgttttctaacccagccctccactgccaaaggccaaaagctcagacagttggcagacgtccagttagctcatctcactcactctgattctcctgtgccacaggaaaagagggcctggaaagcgcagtgcatgctgggtgcatgaagggcagcctgggggacagactgttgtgggaacgtcccactgtcctggcctggagctaggccttgctgttcctcttctctgtgagcctagtggggctgctgcggttctcttgcagtttctggtggcatctcaggggaacacaaagctatgtctattccccaatataggacttttatgggctcggcagttagctgccatgtagaaggctcctaagcagtgggcatggtgaggtttcatctgattgagaagggggaatcctgtgtggaatgttgaactttcgccatggtctccatcgttctgggcgtaaattccctgggatcaagtaggaaaatgggcagaactgcttaggggaatgaaattgccatttttcgggtgaaacgccacacctccagggtcttaagagtcaggctccggctgtagtagctctgatgaaataggctatccactcgggatggcttactttttaaaagggtagggggaggggctggggaagatctgtcctgcaccatctgcctaattccttcctcacagtctgtagccatctgatatcctaggggaaaaggaaggccaggggttcacatagggccccagcgagtttcccaggagttagagggatgcgaggctaacaagttccaaaaacatctgccccgatgctctagtgtttggaggtgggcaggatggagaacagtgcctgtttgggggaaaacaggaaatcttgttaggcttgagtgaggtgtttgcttccttcttgcccagcgctgggttctctccacccagtaggttttctgttgtggtcccgtgggagaggccagactggattattcctcctttgctgatcctgggtcacacttcaccagccagggcttttgacggagacagcaaataggcctctgcaaatcaatcaaaggctgcaaccctatggcctcttggagacagatgatgactggcaaggactagagagcaggagtgcctggccaggtcggtcctgactctcctgactctccatcgctctgtccaaggagaacccggagaggctctgggctgattcagaggttactgctttatattcgtccaaactgtgttagtctaggcttaggacagcttcagaatctgacaccttgccttgctcttgccaccaggacacctatgtcaacaggccaaacagccatgcatctataaaggtcatcatcttctgccacctttactgggttctaaatgctctctgataattcagagagcattgggtctgggaagaggtaagaggaacactagaagctcagcatgacttaaacaggttgtagcaaagacagtttatcatcagctctttcagtggtaaactgtggtttccccaagctgcacaggaggccagaaaccacaagtatgatgactaggaagcctactgtcatgagagtggggagacaggcagcaaagcttatgaaggaggtacagaatattctttgcgttgtaagacagaatacgggtttaatctagtctaggcaccagatttttttcccgcttgataaggaaagctagcagaaagtttatttaaaccacttcttgagctttatcttttttgacaatatactggagaaactttgaagaacaagttcaaactgatacatatacacatatttttttgataatgtaaatacagtgaccatgttaacctaccctgcactgctttaagtgaacatactttgaaaaagcattatgttagctgagtgatggccaagttttttctctggacaggaatgtaaatgtcttactggaaatgacaagtttttgcttgatttttttttttaaacaaaaaatgaaatataacaagacaaacttatgataaagtatttgtcttgtagatcaggtgttttgttttgtttttttaattttaaaatgcaaccctgccccctccccagcaaagtcacagctccatttcagtaaaggttggagtcaatatgctctggttggcaggcaaccctgtagtcatggagaaaggtatttcaagatctagtccaatctttttctagagaaaaagataatctgaagctcacaaagatgaagtgacttcctcaaaatcacatggttcaggacagaaacaagattaaaacctggatccacagactgtgcgcctcagaaggaataatcggtaaattaagaattgctactcgaaggtgccagaatgacacaaaggacagaattcctttcccagttgttaccctagcaaggctagggagggcatgaacacaaacataagaactggtcttctacactttctctgaatcatttaggtttaagatgtaagtgaacaattctttctttctgccaagaaacaaagttttggatgagcttttatatatggaacttactccaacaggactgagggaccaaggaaacatgatgggggaggcagagagggcaagagtaaaactgtagcatagcttttgtcacggtcactagctgatccctcaggtctgctgcaaacacagcatggaggacacagatgactctttggtgttggtctttttgtctgcagtgaatgttcaacagtttgcccaggaactgggggatcatatatgtcttagtggacaggggtctgaagtacactggaatttactgagaaacttgtttgtaaaaactatagttaataattattgcattttcttacaaaaatatattttggaaaattgtatactgtcaattaaagtgtttttgtgtaaactggttcaaaaaaaaaaaaaaaaaaaaaaaaa

SEQ ID NO: 92 - DNA, 2566 bp, Homo sapiens
cgtcgccgtccccgtctcctgccaggcgcggagccctgcgagccgcgggtgggccccaggcgcgcagacatgggctgctccgccaaagcgcgctgggctgccggggcgctgggcgtcgcggggctactgtgcgctgtgctgggcgctgtcatgatcgtgatggtgccgtcgctcatcaagcagcaggtccttaagaacgtgcgcatcgaccccagtagcctgtccttcaacatgtggaaggagatccctatccccttctatctctccgtctacttctttgacgtcatgaaccccagcgagatcctgaagggcgagaagccgcaggtgcgggagcgcgggccctacgtgtacagggagtccaggcacaaaagcaacatcaccttcaacaacaacgacaccgtgtccttcctcgagtaccgcaccttccagttccagccctccaagtcccacggctcggagagcgactacatcgtcatgcccaacatcctggtcttgggtgcggcggtgatgatggagaataagcccatgaccctgaagctcatcatgaccttggcattcaccaccctcggcgaacgtgccttcatgaaccgcactgtgggtgagatcatgtggggctacaaggacccccttgtgaatctcatcaacaagtactttccaggcatgttccccttcaaggacaagttcggattatttgctgagctcaacaactccgactctgggctcttcacggtgttcacgggggtccagaacatcagcaggatccacctcgtggacaagtggaacgggctgagcaaggttgacttctggcattccgatcagtgcaacatgatcaatggaacttctgggcaaatgtggccgcccttcatgactcctgagtcctcgctggagttctacagcccggaggcctgccgatccatgaagctaatgtacaaggagtcaggggtgtttgaaggcatccccacctatcgcttcgtggctcccaaaaccctgtttgccaacgggtccatctacccacccaacgaaggcttctgcccgtgcctggagtctggaattcagaacgtcagcacctgcaggttcagtgcccccttgtttctctcccatcctcacttcctcaacgccgacccggttctggcagaagcggtgactggcctgcaccctaaccaggaggcacactccttgttcctggacatccacccggtcacgggaatccccatgaactgctctgtgaaactgcagctgagcctctacatgaaatctgtcgcaggcattggacaaactgggaagattgagcctgtggtcctgccgctgctctggtttgcagagagcggggccatggagggggagactcttcacacattctacactcagctggtgttgatgcccaaggtgatgcactatgcccagtacgtcctcctggcgctgggctgcgtcctgctgctggtccctgtcatctgccaaatccggagccaagagaaatgctatttattttggagtagtagtaaaaagggctcaaaggataaggaggccattcaggcctattctgaatccctgatgacatcagctcccaagggctctgtgctgcaggaagcaaaactgtagggtcctgaggacaccgtgagccagccaggcctggccgctgggcctgaccggccccccagcccctacaccccgcttctcccggactctcccagcagacagccccccagccccacagcctgagcctcccagctgccatgtgcctgttgcacacctgcacacacgccctggcacacatacacacatgcgtgcaggcttgtgcagacactcagggatggagctgctgctgaagggacttgtagggagaggctcgtcaacaagcactgttctggaaccttctctccacgtggcccacaggctgaccacaggggctgtgggtcctgcgtccccttcctcgggtgagcctggcctgtcccgttcagccgttgggccaggcttcctcccctccaaggtgaaacactgcagtcccggtgtggtggctccccatgcaggacgggccaggctgggagtgccgccttcctgtgccaaattcagtggggactcagtgcccaggccctggcacgagctttggccttggtctacctgccaggccaggcaaagcgcctttacacaggcctcggaaaacaatggagtgagcacaagatgccctgtgcagctgcccgagggtctccgcccaccccggccggactttgatccccccgaagtcttcacaggcactgcatcgggttgtctggcgcccttttcctccagcctaaactgacatcatcctatggactgagccggccactctctggccgaagtggcgcaggctgtgcccccgagctgcccccaccccctcacagggtccctcagattataggtgcccaggctgaggtgaagaggcctgggggccctgccttccgggcgctcctggaccctggggcaaacctgtgacccttttctactggaatagaaatgagttttatcatctttgaaaaataattcactcttgaagtaataaacgtttaaaaaaatggaaaaaaaaaaaaaa

SEQ ID NO: 93 - DNA, 1306 bp, Homo sapiens
gaacggcggcgggaggtgaaatccggttctaaccggtccggggctcccagcgctataaaaactttataaaccccccggagcccgagcagtgtgaagaagaggcgagaacgacccccggaccgaccaaagcccgcgcgccgctgcatcccgcgtccagcacctacgtcccgctgccgtcgccgccgccaccatgcccaagagaaaggctgaaggggatgctaagggagataaagcaaaggtgaaggacgaaccacagagaagatccgcgaggttgtctgctaaacctgctcctccaaagccagagcccaagcctaaaaaggcccctgcaaagaagggagagaaggtacccaaagggaaaaagggaaaagctgatgctggcaaggaggggaataaccctgcagaaaatggagatgccaaaacagaccaggcacagaaagctgaaggtgctggagatgccaagtgaagtgtgtgcatttttgataactgtgtacttctggtgactgtacagtttgaaatactattttttatcaagttttataaaaatgcagaattttgttttactttttttttttttaaaagctatgttgttagcacacagaacacttcattgttgtttttgggggaaggggcatatgtcactaatagaatgtctccaaagctggattgatgtggagaaaacacctttcccttctagttttgagagacttcctcttggctcccaggaggagggattccctgactttgacacacatggccaccttggcacaaaagccttgtggtatagaaaaacaaatttgtttttatgtcctcttctccctttccatctttcagcatagacttaactcccttaagcccagacatctgttgagacctgacccctagtcattggttaccagtgtgtcaggcaatctggactttccagtgatgccactgagatggcacctgtcaaaagagcagtggttccatttctagattgtggatcttcagataaattctgccattttcatttcacttcctgaaagtcagggtcggcttgtgaaaagttgttaaacaacatgctaaatgtgaaatgtcaaccctcactctaaactttccctgttcagagcatcagatgaagacttcattgggttttatagtggctttctgatttttggtagtccattgaagaagggagtttgaaagttgttgtatactgttaacgattgtctgcccatgtcctgcctgaaataccatgattgtttatggaaagtatctttaataaagctggatacagtttggcttggaaaaaaaaaaaaaaaaaaaaaaa

SEQ ID NO: 94 - DNA, 2595 bp, Homo sapiens
gcggcgcaggcggccgagcgggactggctgggtcggctgggctgctggtgcgaggagccgcggggctgtgctcggcggccaaggggacagcgcgtgggtggccgaggatgctgcggggcggtagctccggcgcccctcgctggtgactgctgcgccgtgcctcacacagccgaggcgggctcggcgcacagtcgctgctccgcgctcgcgcccggcggcgctccaggtgctgacagcgcgagagagcgcggccctcaggagcaaggcgaatgtatgacaacatgtccacaatggtgtacataaaggaagacaagttggagaagcttacacaggatgaaattatttctaagacaaagcaagtaattcaggggctggaagctttgaagaatgagcacaattccattttacaaagtttgctggagacactgaagtgtttgaagaaagatgatgaaagtaatttggtggaggagaaatcaaacatgatccggaagtcactggagatgttggagctcggcctgagtgaggcacaggttatgatggctttgtcaaatcacctgaatgctgtggagtccgagaagcagaaactgcgtgcgcaggttcgtcgtctgtgccaggagaatcagtggctacgggatgaactggccaacacgcagcagaaactgcagaagagtgagcagtctgtggctcaactggaggaggagaagaagcatctggagtttatgaatcagctaaaaaaatatgatgacgacatttccccatccgaggacaaagacactgattctaccaaagagcctctggatgaccttttccccaatgatgaagacgacccagggcaaggaatccagcagcagcacagcagtgcagccgcggctgcccagcagggcggctacgagatccccgcgcggctgcggacgctccacaacctggtgatccagtacgcctcgcaggggcgctacgaggtagctgtgcccctctgcaagcaggccctggaggacctggagaagacttcaggacacgaccacccggacgtggccaccatgctcaacatcctggccttggtgtacagggatcagaataaatacaaagatgcagctaacctactgaatgatgccttggctattcgtgagaaaactttgggcaaagatcatcctgcggtggcggcgactttgaataaccttgcagtcctttatggtaaaagagggaagtacaaagaagcagagccgttgtgtaaaagagctctggaaatccgagaaaaggttttggggaaggatcaccccgatgttgccaagcagttaaataacttggccttactgtgccagaaccagggcaagtatgaagaagtagaatattattatcaaagagccctcgagatctaccagacaaaactgggacctgatgaccccaacgtggctaagacgaaaaataacctggcatcctgctatttgaaacaaggaaagttcaagcaagcagaaacactgtacaaagagattctcactcgtgcacatgaaagggagtttggttctgtagatgatgaaaataaacccatctggatgcatgctgaagaaagagaagaatgcaaaggaaagcaaaaggatgggacatcttttggagagtatggcggctggtacaaagcctgcaaagttgatagtccaactgttacaaccactctaaaaaaccttggggcactttacagacgtcaaggcaaatttgaagctgcagaaacgttagaagaagctgctatgaggtctcgtaaacagggtcttgacaatgttcacaaacagagggtggcagaagtgctcaatgaccctgagaacatggagaagcgcaggagccgtgagagcctcaacgtggacgtggtcaagtacgagagtggccctgacggaggggaggaagtgagtatgagcgtagagtggaacgggatgaggaaaatgaagctcgggctggttaactgacttgctcagcgtcccatggcctagccgcccgtgactctcacactgtctcctgcatgacgggtggcgcctcccgcagcttcccttctctctccagtgctgcccgctgtgtctagcagcctctaggatcttgtcagagctgcacctctctgtgaactggccattcctttcggtgctgctgtcctttttgggggggttcctgatttctgtatacatgtagctttgccagatatgtacttagtaatataaactgtattaataaaatccatttactgtgtaatacacgagtttaaaaattaagagcgattagctgttcactttggtaacaggtagttaagtgtcacacaaggtgttgttgcaatggcatgacggtgacctgttgacgtaactaagccttagagcaaggcatgtgccgcacgtgctccgtggtacttagagccctgggggccccgctcggactccgggtctccctaggatatgccccagtagcatttgctgtgtagtctgtgtgtgaaatttgggcattctgcttttctctactaatcttgaagtgctcagtgatttgtgtatttgtgtctttctaacttctaataaactcactccgactgaaaaaaaaaaaaaaaaaaaaaaaaaaaaaaaaaaaaaa

SEQ ID NO: 95 - DNA, 2048 bp, Homo sapiens
gcacagtggcccttaagcgaggagcggcggcgcccgcagcaatcacagcagtgccgacgtcgtgggtgtttggtgtgaggctgcgagccgccgcgagttctcacggtcccgccggcgccaccaccgcggtcactcaccgccgccgccgccaccactgccaccacggtcgcctgccacaggtgtctgcaattgaactccaaggtgcagaatggtttggaaagtagctgtattcctcagtgtggccctgggcattggtgccgttcctatagatgatcctgaagatggaggcaagcactgggtggtgatcgtggcaggttcaaatggctggtataattataggcaccaggcagacgcgtgccatgcctaccagatcattcaccgcaatgggattcctgacgaacagatcgttgtgatgatgtacgatgacattgcttactctgaagacaatcccactccaggaattgtgatcaacaggcccaatggcacagatgtctatcagggagtcccgaaggactacactggagaggatgttaccccacaaaatttccttgctgtgttgagaggcgatgcagaagcagtgaagggcataggatccggcaaagtcctgaagagtggcccccaggatcacgtgttcatttacttcactgaccatggatctactggaatactggtttttcccaatgaagatcttcatgtaaaggacctgaatgagaccatccattacatgtacaaacacaaaatgtaccgaaagatggtgttctacattgaagcctgtgagtctgggtccatgatgaaccacctgccggataacatcaatgtttatgcaactactgctgccaaccccagagagtcgtcctacgcctgttactatgatgagaagaggtccacgtacctgggggactggtacagcgtcaactggatggaagattcggacgtggaagatctgactaaagagaccctgcacaagcagtaccacctggtaaaatcgcacaccaacaccagccacgtcatgcagtatggaaacaaaacaatctccaccatgaaagtgatgcagtttcagggtatgaaacgcaaagccagttctcccgtccccctacctccagtcacacaccttgacctcacccccagccctgatgtgcctctcaccatcatgaaaaggaaactgatgaacaccaatgatctggaggagtccaggcagctcacggaggagatccagcggcatctggatgccaggcacctcattgagaagtcagtgcgtaagatcgtctccttgctggcagcgtccgaggctgaggtggagcagctcctgtccgagagagccccgctcacggggcacagctgctacccagaggccctgctgcacttccggacccactgcttcaactggcactcccccacgtacgagtatgcgttgagacatttgtacgtgctggtcaacctttgtgagaagccgtatccgcttcacaggataaaattgtccatggaccacgtgtgccttggtcactactgaagagctgcctcctggaagcttttccaagtgtgagcgccccaccgactgtgtgctgatcagagactggagaggtggagtgagaagtctccgctgctcgggccctcctggggagcccccgctccagggctcgctccaggaccttcttcacaagatgacttgctcgctgttacctgcttccccagtcttttctgaaaaactacaaattagggtgggaaaagctctgtattgagaagggtcatatttgctttctaggaggtttgttgttttgcctgttagttttgaggagcaggaagctcatgggggcttctgtagcccctctcaaaaggagtctttattctgagaatttgaagctgaaacctctttaaatcttcagaatgattttattgaagagggccgcaagccccaaatggaaaactgtttttagaaaatatgatgatttttgattgcttttgtatttaattctgcaggtgttcaagtcttaaaaaataaagatttataacagaacccaaaaaaaaaaaaaaaaaaaaaaaaaaaaaaa

SEQ ID NO: 96 - DNA, 2769 bp, Homo sapiens
aagacgctcagaggattctgacaatatctttaccggagaagaggcaaagtacgctcaaagccgaagccacagctcctcctgccgcatttctttcctgcttgcgaattccaagctgttaaataagatgtgcaaagggcttgcaggtctgccggcttcttgcttgaggagtgcaaaagatatgaaacatcggctaggtttcctgctgcaaaaatctgattcctgtgaacacaattcttcccacaacaagaaggacaaagtggttatttgccagagagtgagccaagaggaagtcaagaaatgggctgaatcactggaaaacctgattagtcatgaatgtgggctggcagctttcaaagctttcttgaagtctgaatatagtgaggagaatattgacttctggatcagctgtgaagagtacaagaaaatcaaatcaccatctaaactaagtcccaaggccaaaaagatctataatgaattcatctcagtccaggcaaccaaagaggtgaacctggattcttgcaccagggaagagacaagccggaacatgctagagcctacaataacctgctttgatgaggcccagaagaagattttcaacctgatggagaaggattcctaccgccgcttcctcaagtctcgattctatcttgatttggtcaacccgtccagctgtggggcagaaaagcagaaaggagccaagagttcagcagactgtgcttccctggtccctcagtgtgcctaattctcacctgaaggcagagggatgaaatgccaagactctatgctctggaaaacctgaggccaaatattgatctgtattaagctccagtgctttatccacattgtagcctaatattcatgctgcctgccatgtgtgagtcacttctacgcataaactagatatagcttttggtgtttgagtgttcatcagggtgggaccccattccagtccaattttcctaagtttctttgagggttccatgggagcaaatatctaaataatggcctggtaggtctggattttcaaagattgttggcagtttcctcctcccaacagttttacctcgggatggttggttagtgcatgtcacatgacatccacatgcacatgtattctgttggccagcacgttctccagactctagatgtttagatgaggttgagctatgatatgtgcttgtgtgtatgtctatgtgtatatattatatatacattagacacacatatacattatttctgtatatagatgtctgtgtatacatatgtatgtgtgagtgtatgtacacacacacacacacacacacacacttttgcaagagtgatgggaaagaccctaggtgctcataactagagtatgtgtatgtacttacatgggtgttttgatctctgttctttcatactacatttgaacagggcaaaatgaactaactgccatgtaggctaagaaagaaatgctaacctgtggaaagttggttttgtaaaattccatggatcttgctggagaagcatccaaggaacttcatgcttgatttgaccactgacagcctccaccttgagcactattctaaggagcaaataccttagctcccttgagctggttttctctgatggcacttttgagctcctaagctgccagccttcccttcttttcctgggtgctcagggcatgcttattagcagctgggttggtatggagttggcagacaggatgttcaacttaatgaagaaatacagctaaggccttgccagcaacacctgccgtaagttactggctgagtgagggcatagaagttaaaggttactgtttttatcctctatccttttttcctttcctgatcaaggtgctcttctcattttttcctgagaaccttagccatcagatgaggctccttagtttattgtggttggttgttttttctttataatggctctgggctatatgcccatatttataaaccagcagcaggggaaagattatattttataagagggaacaaattttcacaatttgaaaagcccacataagttttctcttttaaggtagaatcttgttaatttcattccaaacatcggggctaacagagactggaggcatttctttttaggctctgagactaaatgagaggaaaagaaaagaaaaaaaaatgattgtctaaccaattgtgagaattactgtttgaaacttttcaaggcacattgaaatacttgaaaacttctcatttatgttatttatgatgttattttgtacgtgttattattattatattgttttataaatggaggtacaggatatcacctgaattattaatgaatgcccaggaagtaattttcttctcattcttctaaaactactgcctttcaaagtgcacacacacgcgtccacatacactgcattcgttgctccagtataaattacatgcatgagcacctttctggcttttaagccaatataatgggctgcaaaatgaagacaccagagtgtatgcatacaaatctcactgtattaaagatgcaggttttctaattgtacccttcttgtctctctggcaatcttgcccttaatatccctggagttcctcatcagtgtcattttctgttatacacagttccacaattttgtctctagttgacttcaaatgtgtaactttattggtcttgccctattataattgtcatgactttcagattgtatctgaactcacagactgctgtcttactaataggtctggaaggtcacgctgaatgagaagtaaattattttatgtaaaa

SEQ ID NO: 97 - DNA, 2386 bp, Homo sapiens
agcatacgccgagccggtctttgagcgctaacgtctttctgtctccccgcggtggtgatgacggtgaaaactgaggctgctaagggcaccctcacttactccaggatgaggggcatggtggcaattctcatcgctttcatgaagcagaggaggatgggtctgaacgactttattcagaagattgccaataactcctatgcatgcaaacaccctgaagttcagtccatcttgaagatctcccaacctcaggagcctgagcttatgaatgccaacccttctcctccaccaagtccttctcagcaaatcaaccttggcccgtcgtccaatcctcatgctaaaccatctgactttcacttcttgaaagtgatcggaaagggcagttttggaaaggttcttctagcaagacacaaggcagaagaagtgttctatgcagtcaaagttttacagaagaaagcaatcctgaaaaagaaagaggagaagcatattatgtcggagcggaatgttctgttgaagaatgtgaagcaccctttcctggtgggccttcacttctctttccagactgctgacaaattgtactttgtcctagactacattaatggtggagagttgttctaccatctccagagggaacgctgcttcctggaaccacgggctcgtttctatgctgctgaaatagccagtgccttgggctacctgcattcactgaacatcgtttatagagacttaaaaccagagaatattttgctagattcacagggacacattgtccttactgacttcggactctgcaaggagaacattgaacacaacagcacaacatccaccttctgtggcacgccggagtatctcgcacctgaggtgcttcataagcagccttatgacaggactgtggactggtggtgcctgggagctgtcttgtatgagatgctgtatggcctgccgcctttttatagccgaaacacagctgaaatgtacgacaacattctgaacaagcctctccagctgaaaccaaatattacaaattccgcaagacacctcctggagggcctcctgcagaaggacaggacaaagcggctcggggccaaggatgacttcatggagattaagagtcatgtcttcttctccttaattaactgggatgatctcattaataagaagattactcccccttttaacccaaatgtgagtgggcccaacgacctacggcactttgaccccgagtttaccgaagagcctgtccccaactccattggcaagtcccctgacagcgtcctcgtcacagccagcgtcaaggaagctgccgaggctttcctaggcttttcctatgcgcctcccacggactctttcctctgaaccctgttagggcttggttttaaaggattttatgtgtgtttccgaatgttttagttagccttttggtggagccgccagctgacaggacatcttacaagagaatttgcacatctctggaagcttagcaatcttattgcacactgttcgctggaagctttttgaagagcacattctcctcagtgagctcatgaggttttcatttttattcttccttccaacgtggtgctatctctgaaacgagcgttagagtgccgccttagacggaggcaggagtttcgttagaaagcggacgctgttctaaaaaaggtctcctgcagatctgtctgggctgtgatgacgaatattatgaaatgtgccttttctgaagagattgtgttagctccaaagcttttcctatcgcagtgtttcagttctttattttcccttgtggatatgctgtgtgaaccgtcgtgtgagtgtggtatgcctgatcacagatggattttgttataagcatcaatgtgacacttgcaggacactacaacgtgggacattgtttgtttcttccatatttggaagataaatttatgtgtagacttttttgtaagatacggttaataactaaaatttattgaaatggtcttgcaatgactcgtattcagatgcttaaagaaagcattgctgctacaaatatttctatttttagaaagggtttttatggaccaatgccccagttgtcagtcagagccgttggtgtttttcattgtttaaaatgtcacctgtaaaatgggcattatttatgtttttttttttgcattcctgataattgtatgtattgtataaagaacgtctgtacattgggttataacactagtatatttaaacttacaggcttatttgtaatgtaaaccaccattttaatgtactgtaattaacatggttataatacgtacaatccttccctcatcccatcacacaactttttttgtgtgtgataaactgattttggtttgcaataaaaccttgaaaaatatttacaaaaaaaaaaaaaaaa

SEQ ID NO: 98 - DNA, 3244 bp, Homo sapiens
taatagaacacttcacctgaacctaaaatggtgagcgagagtcaccatgaggccctggcagccccgcctgtcaccactgtcgcgactgttctgccaagcaatgccacagagccagccagtcctggagaaggaaaggaagatgcattttctaagctgaaggagaagtttatgaatgagttgcataaaattccattgccaccgtgggccttaattgcaatagccatagtcgcagtccttttagtcctgacctgctgcttttgtatctgtaagaaatgtttgttcaaaaagaaaaacaagaagaagggaaaggaaaaaggagggaagaatgccattaacatgaaagatgtaaaagacttagggaagacgatgaaagatcaggccctcaaggatgatgatgctgaaactggattgacagatggagaagaaaaagaagaacccaaagaagaggagaaactgggaaaacttcagtattcactggattatgatttccaaaataaccagctgctggtagggatcattcaggctgctgaactgcccgccttggacatggggggcacatctgatccttacgtgaaagtgtttctgctacctgataagaagaagaaatttgagacaaaagtccaccgaaaaacccttaatcctgtcttcaatgagcaatttactttcaaggtaccatactcggaattgggtggcaaaaccctagtgatggctgtatatgattttgatcgtttctctaagcatgacatcattggagaatttaaagtccctatgaacacagtggattttggccatgtaactgaggaatggcgtgacctgcaaagtgctgagaaggaagagcaagagaaattgggtgatatctgcttctcccttcgctacgtacctactgctggtaagctgactgttgtcattctggaggcaaagaacctgaagaagatggatgtgggtggcttatccgatccttatgtgaagattcatctgatgcagaatggtaagaggctgaagaagaaaaagacaacaattaaaaagaacacacttaacccctactacaatgagtcattcagctttgaagtaccttttgaacaaatccagaaagtgcaggtggtggtaactgttttggactatgacaagattggcaagaacgatgccatcggcaaagtctttgtgggctacaacagcaccggcgcggagctgcgacactggtcagacatgctggccaaccccaggcgacctattgcccagtggcacaccctgcaggtagaggaggaagttgatgccatgctggccgtcaagaagtaaaggaaagaagaagcctttctgcatttgcccatatagtgctctttagccagtatctgtaaatacctcagtaatatgggtcctttcatttttccagccatgcattcctaacacaattcagtggtacttggaatcctgttttaatttgcacaaatttaaatgtagagagcccctaagtccttcatcataccactgccctccaaatctactcttcttttaagcaatatgatgtgtagatagagcatgaatgaaattatttattgtatcacactgttgtatataccagtatgctaaagatttatttctagtttgtgtatttgtatgttgtaagcgtttcctaatctgtgtatatctagatgtttttaataagatgttctattttaaactatgtaaattgactgagatataggagagctgataatatattatacggtaaatatagtatcgtctgcattccagcaaaaatatcaactcgtaaggcactagtacagttaaactgacatcttaaaggacaacttaaacctgagctttctattgaatcatttgagtaccaagataaacttacaccacatacttggtgggtgaatccaattttgtagaattcctacacaggcaaaatagcatgatctgagcagcagcatccaggctgacctcaaggaagcatagccacaaaacagaatagcacctgtctgtacatatttacaaagctaaaataatggcttcactcttatatttgaggaagcaactgaacaggagtcaatgatttcatattactgcatatagaataacaacaaggtgttccgtgtgtgtgtgtgtgtgtgtgtgtgtgtgtgtgtgtgtgtgtgtgcacatttgtttggggatgggggagaagaagctaaggggagaagtcaacatttatgaaatattgcctgactatttaaaaagaaaaaagtagctctccattatcacctttatacaaaatgtacatcctgtgaattctgttccagatttcacacctacaataattccaaaaggtttgcacattagagtttgtaacaaaatattttattatataaaaccaggttagaaggaatgcaggatatttttaacacaacaatctgtgcttattacacaaaattactttgtggtaaacagacagtattgtaatcccatcaaaagatgaaagaaaaacaaaaacaaaaaccaacaacaattagccatagttctgaatgcacttcaattaagccaaaacagacagctagtgatctttttatatgctctttttacttaagttttaatttgtcctttaaaaaaaggtgaaacaaaccaagaacaagttctagaaaactgaagcaacctcttatgtatactagatgcttgatttaggaggagtttttaaacgttttcaatgttattatgtagtaaatgacactattatgaagctactagtcattccataagagtcttaaaggactgctctgtgtacactgtgactgccgtgtgtgcttagacccgtagtttcctcagtggatagcactcaatttattccgtagtgatattgtaacaatactgccattcccttctactgcactgcccaaggtgtgtgtagcacaaacagttctcattacaaaggaccaattcagaactgaaaagctatgcataggacaaggaagatacatagaatggggtggaacacagcattttgtcaagcactgtgcaatattccatatttttccccactatggtagacaaccatttcgtggaagggcagcctattatcccacactgcatctagccttttgtcccattcacttctgtgatccattttaatttccaggccacaagacagtagtgatgctctgaaatgaaagtttgtcttcacaaatatcaaaacaaaatggaggaaaactaagcattggcctcatgttcagtcttcaggatatcacaccacgtcttttcaaaaactaaa

SEQ ID NO: 99 - DNA, 3162 bp, Homo sapiens
gcagcctggcggcgacctgaccgcccgaggctccccttcacctgcagcggctgctcggctccctctgggaacgccgccttttctaacttaagggcaacaggtggtgccggtggaccgagagagagctcagctccgccgcgctgggagcggcagttaccctcaccaattagggagcgggggcgggagttgcatggcttccctgatgcgggtgaccaatgggatttgggatcatgagtggaccgggaggagtgggcgtggtcggagtctgagtccaaggtttctcgtgcggcaactgccagagctgcttggagagctaagctggaagggtgcttatccctgcgtagaaacgcctgccaatgctttctcatttggacccagactccagatcgggagcagtcttatagctggatcagctaccaagagaagttgtaaaccaagaagagaaaagcatttcaatttgggacatttatttgcacctggaaatggggaatgggctgtcagaccagacttctatcctgtccaacctgccttcatttcagtctttccacattgttattctgggtttggactgtgctggaaagacaactgtcttatacaggctgcagttcaatgaatttgtaaataccgtacctaccaaaggatttaacactgagaaaattaaggtaaccttgggaaattctaaaacagtcacttttcacttctgggatgtaggtggtcaggagaaattaaggccactgtggaagtcatataccagatgcacagatggcattgtatttgttgtggactctgttgatgtcgaaaggatggaagaagccaaaactgaacttcacaaaataactaggatatcagaaaatcagggagtccctgtacttatagttgctaacaaacaagatttgaggaactcattgtcactttcagaaattgagaaattgttagcaatgggtgaactgagctcatcaactccttggcatttgcagcctacctgtgcaatcataggagatggcctaaaggaaggacttgagaaactacatgatatgatcattaaaagaagaaaaatgttgcggcaacagaaaaagaaaagatgaatatcaatacctattatatctgtgtggagtaggttttctctggtctgattttgacaaatagaagagtgtctacagcgtggtttgcctgtctgccctcctggatgctattaaagctttgttttgttgaacaatcagatgcccaactctgttgccttgtggaagatgagtaaatgcagtgcttcttaaagtggtctcttctccctaccccacaaatcttttggtactaccatttggggaagccaagcaaggatagtaaattgaccagaacacagttgtgggaatttggtctgaagttagtgaaataaaactttaaagagtgtctgcctagtgttttgtgcttacatctttcggggggaagcctttgcaagaaaattgcatacaaggctttgtaacgatcaagtgctaatcgatggaaatgttaaggtagattaacatatatgcagttatattgatcacattggtccaaccagtccttttttgaagtaagggacaaggagtaagtattttcttttttaagtttctgccaaatgatttttgacgctttctggaatcaagtaatttaatagtatagcttaattctagacaatgtttaagttggtctacctttattaaaaataagatatttggggtatattcaagtgcatggattagttttcctgacaaagcatgttttggtgtgtagtcttactttttagaaatagctatgcatcgttctacacaggtttaaaacaacttttttggggatttagggctattataggaatagtttgttgtcagaagcactttcacttgaagaacctaaaatgattgactcattcatagtaaatatgggcatgtaaactaataaatatgcactggatacatatatggatttatgaagaaggcgatttagtcaagaggatgtaattaaaatatgtggtctctaaaatattccagttacaagatatttgttttattaatatttgctggctaaaaacaaatgtggtttttatatatttttgtagtgtgttgagaagagcaaaagctttataaatatacctgatgcgctgtagaatgaaaatgtaaaagataacctgtatgtgttccgagctttaattttttgtttacaaattgaacagtgttacatgggctgtccagtcctgattatagagaggaagaaatggtaacagtatggcagataagaattacaattatagaaaatgaggggaaaataacaaacctgttttatgaaaattcactggtgctgtttacattggaataaaaagctctataaggaggaaaggcctttatctaattcttatctacagacacttacttccagtgaccatattttactaaatcagcttattttttatgtctaaagcaacagctgttctgaaaaatcaccaaaagaaatgcactttgctagcaggatttgttttggctttgggttttgtttttttgttttttttttttttcagtggcataacagtttttggaaccttgattcttgtgtcacacaaaatgaatgaagtagcttgatgtggagccttcatatgttaaatattcctgcactagtgatggtcacttagaatgtttatagaaatgtggataataactaccaataaactacttgaggcactaggagaacagtatttgactttgaattttaatgtatttccacttttgctgaagcttttaatcagatgtgtaaaaacaattgaccagctaggctatttagtcccatagtagttcagatctgcttagatgtgacaggcattgaaggctgtttttttttttttctcccttcactgatactgaaatcatggtatctgctgcaaacatgagtagatccatgatggattaataaagcttgctgaaaaaaaaaatctgtgtatcagttagatttaccagtttgcctgtactttctgtctacctactatgtaaaatagtgctgtttttaagtatttcaaaagcttgtgtgttgaccctttgtagcctaagtacgtaaacaaattaatgttatctaagtttttcatatttcatggacaacaaaagagaaaatggtatgaacactgtacaaactttgatttataaa

SEQ ID NO: 100 - DNA, 2188 bp, Homo sapiens
ctctttcccttcggtgtgccactgaagatcctggtgtcgccatgggccgccgccccgcccgttgttaccggtattgtaagaacaagccgtacccaaagtctcgcttctgccgaggtgtccctgatgccaagattcgcatttttgacctggggcggaaaaaggcaaaagtggatgagtttccgctttgtggccacatggtgtcagatgaatatgagcagctgtcctctgaagccctggaggctgcccgaatttgtgccaataagtacatggtaaaaagttgtggcaaagatggcttccatatccgggtgcggctccaccccttccacgtcatccgcatcaacaagatgttgtcctgtgctggggctgacaggctccaaacaggcatgcgaggtgcctttggaaagccccagggcactgtggccagggttcacattggccaagttatcatgtccatccgcaccaagctgcagaacaaggagcatgtgattgaggccctgcgcagggccaagttcaagtttcctggccgccagaagatccacatctcaaagaagtggggcttcaccaagttcaatgctgatgaatttgaagacatggtggctgaaaagcggctcatcccagatggctgtggggtcaagtacatccccagtcgtggccctctggacaagtggcgggccctgcactcatgagggcttccaatgtgctgcccccctcttaatactcaccaataaattctacttcctgtccacctatgtctttgtatctacattcttgacggggaaggaacttcctctgggaacctttgggtcattgccctttcacttcagaaacaggttgacaactcagccctgctcatgaggcagcaaaccctgcaaagggctgggactggtggccttatgtcagttgtctactctggagcttgacttggacctccccaggtcctaggcagtaggttgaaaaacactgaagtgcttttcatgaagcacagctgcagcaaagccttgcaatcccaggctggggtcagcctacagttgtgttgcttattacaacacatgcggaccaagaggggcttgtgggctagaggctgaccagcagcgtttatttagcaagggtaggtgtgcatcacattgggcttgttctcacccatctggtttggccattcctccttggtgggaatcatccaggtactgctgaggtcacctgcgatttgccccatttcctatctctagcaacctcctgggccccatgcccccaccccttctagaacctgcattcccagggccttcaccacctgaccaaaggtctaggctaacctttggtcatttgtaacaagacctcggaacagacacgtgtgtggcatggtttggcctggggatcttagatgtctgacctgaactattgtagaacagcgctggcttttgggggagcagcaaaaatgagaggagtgctaggtgggtggcctgagcatctgtatccagggacaggactccaaaggcttttggtcccagagctggggtatgttggccccagcccccagcctgtggctcccaaaaggcctctggttttttgtaatctcagtttacagccatttcttaggtttttaattacctttattttattttgccaaacatacctgggaataccttttattttttttttaccttggggtgatggttccaaaccataaatgtgattatagttaacacatgacccttctagcgtcccagccagtgtttttcctgacctctcttctttggagaggaggatggaagggaggggtccggcatgctgctggcattttgctgtgtcctgcagcccctttccgggacacctgggttcacacagctttttagcttacataactggtgcagattttctgtgtggagatgttgccttgaccagccttggctggactttaccaggcatgcagaagcctgtaccaacacagactacagcacccaggaggtgcgagtgtggctgctcagcggttataacaggcctgactgcattgttcaccggattataatgagccaaaatgtttcccggtgtttgctggtttcagggaaggagtttgatatagcagattaaccaccctccttgtagctattggggcttaatggtttcctggtgattcttaccaatccacaataaacatggcccattggcatatctgcaaaaaaaaaaaaaaaaa

SEQ ID NO: 101 - DNA, 2318 bp, Homo sapiens
cgcagggaccgtgctccgccgtctccgccgcatcttccaccctcgccgccgccgcagctccccgcgctcgtgccaccgccgccgcgtccaccctcagcgccaccgccatgcgggagatcgtgcacctgcaggccggccagtgcggcaaccagatcggggccaagttttgggaggttatcagtgacgaacatggcatcgaccccacaggcacataccatggggacagtgacctgcaactggagaggatcaacgtgtactacaacgaggccacaggaggaaattatgtccccagagcggtgctggtggacctggaacccggcaccatggactctgtccgttctggccccttcggtcagatctttcggccggacaacttcgtgtttggccaatccggagccggcaacaactgggcaaaggggcactacacggagggcgcagagctggtggacgctgtcctggacgtagtccggaaggaggccgagagctgcgactgccttcagggcttccagctgacccactcgctggggggtggcacggggtccggaatgggcacgctgctcatcagtaagatccgcgaggagttcccagaccgcatcatgaacaccttcagcgtggtgccctcgcccaaagtgtcagacacggtggtggagccctacaacgccacgctgtctgtgcaccagctggtggagaatacggatgagacctactgcatcgacaacgaggcactctacgacatctgtttccgcaccctcaagctgaccacccccacctacggggacctcaaccacctggtgtcggccaccatgagcggggtcaccacctgcctgcgcttcccgggccagctgaacgccgacctgcgcaagctggccgtcaacatggttccctttcctcgcctgcacttcttcatgcccggcttcgcacccctgaccagccggggcagccagcagtaccgggccctgacggtgcccgagctcacccagcagatgttcgatgccaagaacatgatggcggcgtgcgacccgcgccacggccgctacctgaccgtggccgccgtgttccggggccgcatgtccatgaaggaggtggacgagcagatgctgagcgtgcagagcaagaacagcagctacttcgtggagtggatccccaacaacgtgaagacggccgtgtgcgacatcccgccccgcggcctgaagatggccgcgaccttcatcggcaacagcacggccatccaggagctgttcaagcgcatctccgagcagttcacggccatgttccggcgcaaggccttcttgcactggtacacgggcgagggcatggacgagatggagttcaccgaggccgagagcaacatgaatgacctggtatctgagtaccagcagtaccaggacgccacggccgaggagggcgagttcgaggaggaggcggaggaggaggtggcctaggctgctcccatcgcttcccacctgtcccctcgaggcttctgacctttgatccgctaggccccccatctctgaaccctagagccccgctttccctccaaggctgactccccgctgaccctaacaatacctttggagctcgctttacctctggctacttcatctccgaccctggctcccctttgagccctaatttatctttaacccccttgagctcttccaaccttgacattcccaggaggagccccgcttcaccccttctgactctggaaaccgcacctttaactttgcagaccttccttcacccctgacttctgcttcacctttgacctctgccccccatgaatcccattttacctctagacctataagttctggtttatgtttgacccctccctctgagctgcacttcaccgctgaccttgcctcacctttaaccccccacctgagccccagctcctacctctgaccccaacttctctttgatctctgaatcccctctgactccaacttctctttcaccctctatgagtcccattttacttctacacctgcaagtcctggtttatattggacccctccctccgagctgcagttcacctttgaccttgcctcacctttcaccccccaccccccacagcgtcagctcctacctctgaccccagcttctctctgattcccacaggccccatgcatcctccctgcctcactcccctcagcccctgccgaccttagcttatctgggagagaaacaaggcctggtgcctgtgaggaagagaggtcacccctaccctccctccccgcttccctgcctcaccctcaataaataaattaattgttgtcatggaaaaaaaaaaaaaaaaaaaaaaaaaaaaaaaa

SEQ ID NO: 102 - DNA, 1336 bp, Homo sapiens
gagagacacagagtccggcattggtcccaggcagcagttagcccgccgcccgcctgtgtgtccccagagccatggagagagccagtctgatccagaaggccaagctggcagagcaggccgaacgctatgaggacatggcagccttcatgaaaggcgccgtggagaagggcgaggagctctcctgcgaagagcgaaacctgctctcagtagcctataagaacgtggtgggcggccagagggctgcctggagggtgctgtccagtattgagcagaaaagcaacgaggagggctcggaggagaaggggcccgaggtgcgtgagtaccgggagaaggtggagactgagctccagggcgtgtgcgacaccgtgctgggcctgctggacagccacctcatcaaggaggccggggacgccgagagccgggtcttctacctgaagatgaagggtgactactaccgctacctggccgaggtggccaccggtgacgacaagaagcgcatcattgactcagcccggtcagcctaccaggaggccatggacatcagcaagaaggagatgccgcccaccaaccccatccgcctgggcctggccctgaacttttccgtcttccactacgagatcgccaacagccccgaggaggccatctctctggccaagaccactttcgacgaggccatggctgatctgcacaccctcagcgaggactcctacaaagacagcaccctcatcatgcagctgctgcgagacaacctgacactgtggacggccgacaacgccggggaagaggggggcgaggctccccaggagccccagagctgagtgttgcccgccaccgccccgccctgccccctccagtcccccaccctgccgagaggactagtatggggtgggaggccccacccttctcccctaggcgctgttcttgctccaaagggctccgtggagagggactggcagagctgaggccacctggggctggggatcccactcttcttgcagctgttgagcgcacctaaccactggtcatgcccccacccctgctctccgcacccgcttcctcccgaccccaggaccaggctacttctcccctcctcttgcctccctcctgcccctgctgcctctgatcgtaggaattgaggagtgtcccgccttgtggctgagaactggacagtggcaggggctggagatgggtgtgtgtgtgtgtgtgtgtgtgtgtgtgtgtgtgcgcgcgcgccagtgcaagaccgagattgagggaaagcatgtctgctgggtgtgaccatgtttcctctcaataaagttcccctgtgacactcaaaaaaaaaaaaaaaaaaaaa

SEQ ID NO: 103 - DNA, 4057 bp, Homo sapiens
gggagcaggagcctcgctggctgcttcgctcgcgctctacgcgctcagtccccggcggtagcaggagcctggacccaggcgccggcggcgggcgtgaggcgccggagcccggcctcgaggtgcataccggacccccattcgcatctaacaaggaatctgcgccccagagagtcccggacgccgccggtcggtgcccggcgcgccgggccatgcagcgacggccgccgcggagctccgagcagcggtagcgcccccctgtaaagcggttcgctatgccgggaccactgtgaaccctgccgcctgccggaacactcttcgctccggaccagctcagcctctgataagctggactcggcacgcccgcaacaagcaccgaggagttaagagagccgcaagcgcagggaaggcctccccgcacgggtgggggaaagcggccggtgcagcgcggggacaggcactcgggctggcactggctgctagggatgtcgtcctggataaggtggcatggacccgccatggcgcggctctggggcttctgctggctggttgtgggcttctggagggccgctttcgcctgtcccacgtcctgcaaatgcagtgcctctcggatctggtgcagcgacccttctcctggcatcgtggcatttccgagattggagcctaacagtgtagatcctgagaacatcaccgaaattttcatcgcaaaccagaaaaggttagaaatcatcaacgaagatgatgttgaagcttatgtgggactgagaaatctgacaattgtggattctggattaaaatttgtggctcataaagcatttctgaaaaacagcaacctgcagcacatcaattttacccgaaacaaactgacgagtttgtctaggaaacatttccgtcaccttgacttgtctgaactgatcctggtgggcaatccatttacatgctcctgtgacattatgtggatcaagactctccaagaggctaaatccagtccagacactcaggatttgtactgcctgaatgaaagcagcaagaatattcccctggcaaacctgcagatacccaattgtggtttgccatctgcaaatctggccgcacctaacctcactgtggaggaaggaaagtctatcacattatcctgtagtgtggcaggtgatccggttcctaatatgtattgggatgttggtaacctggtttccaaacatatgaatgaaacaagccacacacagggctccttaaggataactaacatttcatccgatgacagtgggaagcagatctcttgtgtggcggaaaatcttgtaggagaagatcaagattctgtcaacctcactgtgcattttgcaccaactatcacatttctcgaatctccaacctcagaccaccactggtgcattccattcactgtgaaaggcaaccccaaaccagcgcttcagtggttctataacggggcaatattgaatgagtccaaatacatctgtactaaaatacatgttaccaatcacacggagtaccacggctgcctccagctggataatcccactcacatgaacaatggggactacactctaatagccaagaatgagtatgggaaggatgagaaacagatttctgctcacttcatgggctggcctggaattgacgatggtgcaaacccaaattatcctgatgtaatttatgaagattatggaactgcagcgaatgacatcggggacaccacgaacagaagtaatgaaatcccttccacagacgtcactgataaaaccggtcgggaacatctctcggtctatgctgtggtggtgattgcgtctgtggtgggattttgccttttggtaatgctgtttctgcttaagttggcaagacactccaagtttggcatgaaagatttctcatggtttggatttgggaaagtaaaatcaagacaaggtgttggcccagcctccgttatcagcaatgatgatgactctgccagcccactccatcacatctccaatgggagtaacactccatcttcttcggaaggtggcccagatgctgtcattattggaatgaccaagatccctgtcattgaaaatccccagtactttggcatcaccaacagtcagctcaagccagacacatttgttcagcacatcaagcgacataacattgttctgaaaagggagctaggcgaaggagcctttggaaaagtgttcctagctgaatgctataacctctgtcctgagcaggacaagatcttggtggcagtgaagaccctgaaggatgccagtgacaatgcacgcaaggacttccaccgtgaggccgagctcctgaccaacctccagcatgagcacatcgtcaagttctatggcgtctgcgtggagggcgaccccctcatcatggtctttgagtacatgaagcatggggacctcaacaagttcctcagggcacacggccctgatgccgtgctgatggctgagggcaacccgcccacggaactgacgcagtcgcagatgctgcatatagcccagcagatcgccgcgggcatggtctacctggcgtcccagcacttcgtgcaccgcgatttggccaccaggaactgcctggtcggggagaacttgctggtgaaaatcggggactttgggatgtcccgggacgtgtacagcactgactactacagggtcggtggccacacaatgctgcccattcgctggatgcctccagagagcatcatgtacaggaaattcacgacggaaagcgacgtctggagcctgggggtcgtgttgtgggagattttcacctatggcaaacagccctggtaccagctgtcaaacaatgaggtgatagagtgtatcactcagggccgagtcctgcagcgaccccgcacgtgcccccaggaggtgtatgagctgatgctggggtgctggcagcgagagccccacatgaggaagaacatcaagggcatccataccctccttcagaacttggccaaggcatctccggtctacctggacattctaggctagggcccttttccccagaccgatccttcccaacgtactcctcagacgggctgagaggatgaacatcttttaactgccgctggaggccaccaagctgctctccttcactctgacagtattaacatcaaagactccgagaagctctcgagggaagcagtgtgtacttcttcatccatagacacagtattgacttctttttggcattatctctttctctctttccatctcccttggttgttcctttttctttttttaaattttctttttcttcttttttttcgtcttccctgcttcacgattcttaccctttcttttgaatcaatctggcttctgcattactattaactctgcatagacaaaggccttaacaaacgtaatttgttatatcagcagacactccagtttgcccaccacaactaacaatgccttgttgtattcctgcctttgatgtggatgaaaaaaagggaaaacaaatatttcacttaaactttgtcacttctgctgtacagatatcgagagtttctatggattcacttctatttatttattattattactgttcttattgtttttggatggcttaagcctgtgtataaaaaagaaaacttgtgttcaatctgtgaagcctttatctatgggagattaaaaccagagagaaagaagatttattatgaaccgcaatatgggaggaacaaagacaaccactgggatcagctggtgtcagtccctacttaggaaatactcagcaactgttagctgggaagaatgtattcggcaccttcccctgaggacctttctgaggagtaaaaagactactggcctctgtgccatggatgattcttttcccatcaccagaaatgatagcgtgcagtagagagcaaagatggcttccgtgagacacaagatggcgcatagtgtgctcggacacagttttgtcttcgtaggttgtgatgatagcactggtttgtttctcaagcgctatccacagaacctttgtcaacttcagttgaaaagaggtggattcatgtccagagctcatttcggggtcaggtgggaaagcc

SEQ ID NO: 104 - DNA, 1745 bp, Homo sapiens
ccgtcgcccggatcccctgagctgcccgccatcccacgtgaccgcgccgccccccagctccaccgctgagcccgctcgccatggccctcttcggggccctcttcctagcgctgctggcaggcgcacatgcagagttcccaggctgcaagatccgcgtcacctccaaggcgctggagctggtgaagcaggaggggctgcgctttctggagcaagagctggagactatcaccattccggacctgcggggcaaagaaggccacttctactacaacatctctgaggtgaaggtcacagagctgcaactgacatcttccgagctcgatttccagccacagcaggagctgatgcttcaaatcaccaatgcctccttggggctgcgcttccggagacagctgctctactggttcttctatgatgggggctacatcaacgcctcagctgagggtgtgtccatccgcactggtctggagctctcccgggatcccgctggacggatgaaagtgtccaatgtctcctgccaggcctctgtctccagaatgcacgcggccttcgggggaaccttcaagaaggtgtatgattttctctccacgttcatcacctcagggatgcgcttcctcctcaaccagcagatctgccctgtcctctaccacgcagggacggtcctgctcaactccctcctggacaccgtgcctgtgcgcagttctgtggacgagcttgttggcattgactattccctcatgaaggatcctgtggcttccaccagcaacctggacatggacttccggggggccttcttccccctgactgagaggaactggagcctccccaaccgggcagtggagccccagctgcaggaggaagagcggatggtgtatgtggccttctctgagttcttcttcgactctgccatggagagctacttccgggcgggggccctgcagctgttgctggtgggggacaaggtgccccacgacctggacatgctgctgagggccacctactttgggagcattgtcctgctgagcccagcagtgattgactccccattgaagctggagctgcgggtcctggccccaccgcgctgcaccatcaagccctctggcaccaccatctctgtcactgctagcgtcaccattgccctggtcccaccagaccagcctgaggtccagctgtccagcatgactatggacgcccgtctcagcgccaagatggctctccgggggaaggccctgcgcacgcagctggacctgcgcaggttccgaatctattccaaccattctgcactggagtcgctggctctgatcccattacaggcccctctgaagaccatgctgcagattggggtgatgcccatgctcaatgagcggacctggcgtggggtgcagatcccactacctgagggcatcaactttgtgcatgaggtggtgacgaaccatgcgggattcctcaccatcggggctgatctccactttgccaaagggctgcgagaggtgattgagaagaaccggcctgctgatgtcagggcgtccactgcccccacaccgtccacagcagctgtctgagccctcaatccccaagctggcagctgtcattcaggaccccaacccctctcagcccctcttttcccacattcatagcctgtagtgccccctctaacccccagtgccacagagaagacgggatttgaagctgtacccaatttaattccataatcaatctatcaattacagtccgtccaccacctc

SEQ ID NO: 105 - DNA, 3892 bp, Homo sapiens
tagaatacttgggtgacatctgcctgagagatctccaagaattacagaagacaaaaatactaatgcatttgagaaagcggtagttttggggggagggggaaaaagcaactgctttcctgatctgcaacttggctggatgctaagatgtcagtggacatgaatagccaggggtctgacagcaatgaagaggactatgacccaaattgtgaggaagaggaagaagaagaagaagacgaccctggggacatagaggactattacgtgggagtagccagcgatgtggagcagcagggggctgatgcctttgatcccgaggagtaccagttcacttgcttgacctacaaggaatctgagggtgccctcaatgagcacatgaccagcttagcttctgtcctaaaggtatctcattcagttgctaaacttatattagttaatttccactggcaagtttcagagatattggacagatacaagtccaattctgctcaactgcttgttgaggctcgagttcagcctaatccatcaaaacatgttcccacatcccatccccctcaccactgtgcagtgtgtatgcagtttgtgcgaaaggaaaacctactctctctggcctgtcagcaccagttttgccgcagctgctgggagcagcactgctcagttctcgtcaaggacggcgtgggcgtgggagtctcttgcatggctcaggactgtccactccgtacaccagaggactttgtgtttccattgcttcccaatgaagaattgagagagaaatacaggcgctacctcttcagggactatgtggagagtcattaccagctccagctgtgccctggtgcagactgccccatggttattcgggtacaggagcctagagctcgccgagtacagtgcaatcggtgcaacgaggtcttctgtttcaagtgtcgtcagatgtatcacgcacccacagactgtgccacaatccggaaatggctcacgaagtgtgcagacgactctgaaacagccaactacattagtgctcacactaaagactgtcccaagtgcaacatctgcattgagaagaatggaggctgcaatcacatgcaatgctccaaatgtaaacacgacttctgctggatgtgtctaggagattggaagactcatggcagtgaatactatgagtgcagtcgttacaaggagaatcctgacatcgtgaaccagagccaacaagcccaggcgagggaagccctcaagaagtacttattctactttgagaggtgggaaaaccacaataaaagcttgcagctagaggcacagacataccagcggattcacgagaagattcaggagagggtcatgaacaatctggggacatggatcgactggcagtacctacagaatgctgccaagctcttggccaagtgtcgatacaccctgcaatacacctacccatatgcatattacatggagtccggacccaggaagaagctgtttgaataccagcaggctcagctggaggctgagatcgaaaacctctcatggaaagtggagcgtgcagacagctatgacagaggggacttggagaaccagatgcatatagcggagcagcggaggagaaccctgctgaaagatttccatgacacctaagttgggatgtggatgtgccggggtgaggaagatgtggctgcaaggtctcccggctgccatactgcatgctgcaggctctgcctttcatgaccccaggcaacagccagggccccactcctgagagacactggcaacacctcttagttgatttctgttttcttctcttttcactttttgtttctaccagggtagaggccatgttgaactggcctcttttcaggacttttatttccccctggatggttgttgggagggagggaaagtgttttctgaatggctattaatagtattagatcattacaacttatgtaactttcaaaggttgtacaattatacaaaaaaaaaaaaaaaggcaaactataggataacacagagccctttttgaaaataaattggcattggagtgttttaccctctagctgttttacttagaatgtaacatatgctgcctacccacctcaaaatgtctgtactgcaagagggccctgggcctctgctttccatattcacgtttggccagagttgtagtcccaaagaagagcatgggtggcagatggtagggaattgaactggcctgtgcaatgggcatggagcacaaggggtcacagcatgcctcctgccttaccgtggcagtacggagacagtccagaacatggtcttcttgccacggggtgttgttgtctctggtggtgctgcatgtctgtggctcacctttattcttgaaactgaggtttacctggatctggctactgaggctagagcccacagcagaatggggttgggcctgtggcccccaaactagggggtgtgggttcatcacagtgttgccttttgtctcctaaagatagggatctacttttgaagggaattgttcctcccaaataaatttgctttaccttggtcctttcttttgtgccagtattcaagtggtatagctctgagcagggtcacatttggccaaacctgacactgtcttgctgcattctcctttggcaaacatcagggtcagaattcaggatagcccttcctagggcactggactttctggcatgggggctgtgtttgcacaagttattttcatgttacctggagagtgtccagaggctgctctgaggctgaggtgtgttcccccttgcctggttccagctgtcagagggataccatcctagggtctgggaatccaaggccacgagactccttggtttgtggtccgagatcctgtactaaggagggtctggccagaggaacagaccagcttttgcacaatgaagcgcaagggaacaagtggtttgcctggtgtcctacctgtcctgaacctggtcctgtgggccattgaaaagttagatctgtgatctctggggtttttgtggctttgttcaatgcttccactctagggcaggcagagcagtctatactctcccaagcctgcttgacctccaagtagagctgatacagagatctgtgaatattgtgatagaaattctttggtattcatacatttcagctgcaagtcagcaatttcccaggtaccatgtaagctataaaacagtcattcttaaagacagaggatagctgtgactcatgggatcatgaggtccatggctggttgcaggttccctttttccttcctcaggttttgtctcttcctgtgttgtccccagcaagggagagactgtggggtggattgggagaacagattaggagtatagcaaatgaacccagaatggaacagtggggagctaactgtgaatgaggagagtacctgctgcaggacctggaggtcaggtgtgaatgctgtattggcacagggaataaatatcctggcgtctggagccttcacctctccgtcaagtccttcctgtgatactgccatggcacaggatctgagttgcagctctgcaccctaaatcacaccctgggcattgtctgggctgcagggctgccaggttctgtacttgtgtccagctgtggccctggatgctggagctggagggttttctgtgctcagactgtagcctgtagctcttggcctgtgtagagccccctcctgtgccctcagtggctgtcgtttgttaacatcatcaggaagatgggaaaggtcaggcagaatttttctgccctacaaagggtggaagagaaaggacacagtattttcatgaatttaccatatatctttgtttttcttcaacgaaaaagttaattgaggcaatgtcatctgctcaaagttgagtggtttattcacaataaactgtaagtttctgattat

SEQ ID NO: 106 - DNA, 1232 bp, Homo sapiens
tttcccgagatcaccaagatgctgggcgccgagtggagcaagctgcagccaacggaaaagcagcggtacctggatgaggccgagagagagaagcagcagtacatgaaggagctgcgggcgtaccagcagtctgaagcctataagatgtgcacggagaagatccaggagaagaagatcaagaaagaagactcgagctctgggctcatgaacactctcctgaatggacacaagggtggggactgcgatggcttctccaccttcgatgttcccatcttcactgaagagttcttggaccaaaacaaagcgcgtgaggcggagcttcggcgcttgcggaagatgaatgtggccttcgaggagcagaacgcggtactgcagaggcaaaacgcagagcatgagcagcgcgcgcgagcgtctggagcaggagctggcgctggaggagcggaggacgctggcgctgcagcagcagctccaggccgtgcgccaggcgctcaccgccagcttcgcctcactgccggtgccgggcacgggcgaaacgcccacgctgggcactctggacttctacatggcccggcttcacggagccatcgagcgcgaccccgcccagcacgagaagctcatcgtccgcatcaaggaaatcctggcccaggtcgccagcgagcacctgtgaggagtgggcgggcccacgatgcagaggagaagctgtgggcgcggccctgccacaccccaccccgtggacgagaggctgggggtccaccctttggggcctggtcccatcctgcacctttgggggctccagcccccctaaaattaaatttctgcagcatccctttagctttcaatctccccagccccctgaacccggaaaaagcactcgctgcgcgatacacccagaagaacctcacagccgagggtgcccctcctcggaggacagccacgcgctacactggctctccgggccacccccaggacacagggcagacgaaacccacccccagcacacggcaggaccccccaaattactcactacggggggctgtgccataggccacacaggaagctgccttgtggggacttacctggggtgtcccccgcatgcctgtaccccagatgggtgggggccggctttgcccatcctgctctcctccagccgagggaccctggtgggggtggctccttctcactgctggatccggactttttaaataaaaacaagtaaaatttgtgttttaaaa

SEQ ID NO: 107 - DNA, 4095 bp, Homo sapiens
gtgtgtgagagtccagccttgggccagagtgccgggtctaggcctggaagcgcgaggcgggcatttcggaagagagtggcgcggcgtggggcgccgcgagggcactacgagcccaggaactgccgcgccggcccgattttccgcggctgtataaggactagcgcttcggtagccggggagctggagggaacctgatttgagatcaattcttggagaacacaaagaagtgtgatggattgaaccagctgccctttgaccctgctaacaacaacgagcccctgcagtttggtagtgccagtggccctctggtcacagaaggcctcattgagaatggaggggaatcaagcaagaaaagaaagagaacaaatactccttcagccgataacagtagaactctgaacgtggattccactgcaatgacactacctatgtctgatccaactgcatgggccacagcaatgaataatcttggaatggcaccgctgggaattgccggacaaccaattttacctgactttgatcctgctcttggaatgatgactggaattccaccaataactccaatgatgcctggtttgggaatagtacctccaccaattcctccagatatgccagtagtaaaagagatcatacactgtaaaagctgcacgctcttccctccaaatccaaatctcccacctcctgcaacccgagaaagaccaccaggatgcaaaacagtatttgtgggtggtctgcctgaaaatgggacagagcaaatcattgtggaagttttcgagcagtgtggagagatcattgccattcgcaagagcaagaagaacttctgccacattcgctttgctgaggagtacatggtggacaaagccctgtatctgtctggttaccgcattcgcctgggctctagtactgacaagaaggacacaggcagactccacgttgatttcgcacaggctcgagatgacctgtatgagtgggagtgtaaacagcgtatgctagccagagaggagcgccatcgtagaagaatggaagaagaaagattgcgtccaccatctccacccccagtggtccactattcagatcatgaatgcagcattgttgctgaaaaattaaaagatgattccaaattctcagaagctgtacagaccttgcttacctggatagagcgaggagaggtcaaccgtcgtagcgccaataacttctactccatgatccagtcggccaacagccatgtccgccgcctggtgaacgagaaagctgcccatgagaaagatatggaagaagcaaaggagaagttcaagcaggccctttctggaattctcattcaatttgagcagatagtggctgtgtaccattccgcctccaagcagaaggcatgggaccacttcacaaaagcccagcggaagaacatcagcgtgtggtgcaaacaagctgaggaaattcgcaacattcataatgatgaattaatgggaatcaggcgagaagaagaaatggaaatgtctgatgatgaaatagaagaaatgacagaaacaaaagaaactgaggaatcagccttagtatcacaggcagaagctctgaaggaagaaaatgacagcctccgttggcagctcgatgcctaccggaatgaagtagaactgctcaagcaagaacaaggcaaagtccacagagaagatgaccctaacaaagaacagcagctgaaactcctgcaacaagccctgcaaggaatgcaacagcatctactcaaagtccaagaggaatacaaaaagaaagaagctgaacttgaaaaactcaaagatgacaagttacaggtggaaaaaatgttggaaaatcttaaagaaaaggaaagctgtgcttctaggctgtgtgcctcaaaccaggatagcgaataccctcttgagaagaccatgaacagcagtcctatcaaatctgaacgtgaagcactgctagtggggattatctccacattccttcatgttcacccatttggagcaagcattgaatacatctgttcctacttgcaccgtcttgataataagatctgcaccagcgatgtggagtgtctcatgggtagactccagcataccttcaagcaggaaatgactggagttggagccagcctggaaaagagatggaaattctgtggcttcgagggcttgaagctgacctaaatctctttgcctaacaacttgggatcctgaagataaatatgtgttggacaagcatagaaagtgatttatatttttaatggttttcaagtggaagttcctttgaatttgtcagttcattcctggaaaatcttttgagttaaaataaggatcctaggacagcacctcgaactacaggccctaaagagaaattgcctcaaaccacaagtgctgtaacttcctcccctttctgtcaattggttgtctttaaatattgcaaaagtcctgatgctaaacagtatttggagtgttttcagtgtctgtactactgttgtagaccttggtatttttttaaacactgttaactgaaatgttttgatgatttgtatgtgatttgtgtttctaaacttctctttacattaatgttgttactggtgaaaggcatgagagcagcactaagtcctctgtgtaactgccattgtctttccaatccccagtagaccagtaaataaataacacatcagtgtcttctagaaggtgcctgaccaggttcaccttttaaacgacaaagcatggtttgtggctttttgcaaaattactatgaaccaaaagttgacaaatgttccaaagttattttctctaacatatcacattaaagatctgtttcagaattgtaaaaagtacatctagatgtgtttacagaaagcaagtatccagtatgactggcatgtgttcatgctattcagaatcacttgtaaatagtctgcttttaaaggagggcatgttcagttttctgtgaattaaaatatgctcatgtgtgggcacacacgcacaaacacacacacgcacgcacacagtggcagaagggatttatattaatattctttcccctctggccttcttacagtctgttggtccctttgcttctgttgtcagtgtgttgaattgcaaaccgagtactgctgtaaatactatgtttacttcatgctgaatgtttgcaaagacttgatataagtattaatagtaatgaatcaatgaataaataatgagctagggtttgtgaggctttctacaaataggtcagctccacctggagtgcgaattgccagagacaccttggtagtgcccatcggcaaatcgcaatggcagcatgtgagtggaccattcagaaacttctgcttggtggaaagtaaacagagaggatggaggtttggggcgaatgtcctgaggcagagatggtctttattgtgtgtggtggtggttgtggtatttataataatgcaagcataccctcccttgagtctcaattgaagataaaagaatgtactgagcaagcaaagccaatggagagtatttcacaaaaatactttgtaaatgagatgccagtagtgttcaaagttgtatttttaaaagataaatattcctttttatacctcagttttgtgtcctgtttttaatgacttacgctctaagtaatccattagtagttatctcagttccttcctttgggttactagaatgttggaaaaagatgccaagtctgtcttgacaactggaaacagggttccacagcagcccattcgtgctgaaaactggcttccccctgaagcaccctgctgtggcaccagcaggaagctcaggttaattttacactagcttgctcactgatgcatctctcatcaatgctacggaaggctttgattcatcagtctcgggctcttggaatacctaattttaataatatctatgaaatcaagggaaactttccatttacagttatttcttgtttaaataaactaaattaatttttaggggagagcagtaggaaaaagagctaatgcatgcggggtttaatacctaggtgatgggttgaggtgcagcaaaaccaccatggcacacgttcacctatgtaacaaacctgcacatcctgcacatgtaccccggaacttacttaaaa

SEQ ID NO: 108 - DNA, 3583 bp, Homo sapiens
acttgcgtctcgccctccggccaagcatggggcttcccaggctggtctgcgccttcttgctcgccgcctgctgctgctgtcctcgcgtcgcgggtgtgcccggagaggctgagcagcctgcgcctgagctggtggaggtggaagtgggcagcacagcccttctgaagtgcggcctctcccagtcccaaggcaacctcagccatgtcgactggttttctgtccacaaggagaagcggacgctcatcttccgtgtgcgccagggccagggccagagcgaacctggggagtacgagcagcggctcagcctccaggacagaggggctactctggccctgactcaagtcaccccccaagacgagcgcatcttcttgtgccagggcaagcgccctcggtcccaggagtaccgcatccagctccgcgtctacaaagctccggaggagccaaacatccaggtcaaccccctgggcatccctgtgaacagtaaggagcctgaggaggtcgctacctgtgtagggaggaacgggtaccccattcctcaagtcatctggtacaagaatggccggcctctgaaggaggagaagaaccgggtccacattcagtcgtcccagactgtggagtcgagtggtttgtacaccttgcagagtattctgaaggcacagctggttaaagaagacaaagatgcccagttttactgtgagctcaactaccggctgcccagtgggaaccacatgaaggagtccagggaagtcaccgtccctgttttctacccgacagaaaaagtgtggctggaagtggagcccgtgggaatgctgaaggaaggggaccgcgtggaaatcaggtgtttggctgatggcaaccctccaccacacttcagcatcagcaagcagaaccccagcaccagggaggcagaggaagagacaaccaacgacaacggggtcctggtgctggagcctgcccggaaggaacacagtgggcgctatgaatgtcaggcctggaacttggacaccatgatatcgctgctgagtgaaccacaggaactactggtgaactatgtgtctgacgtccgagtgagtcccgcagcccctgagagacaggaaggcagcagcctcaccctgacctgtgaggcagagagtagccaggacctcgagttccagtggctgagagaagagacagaccaggtgctggaaagggggcctgtgcttcagttgcatgacctgaaacgggaggcaggaggcggctatcgctgcgtggcgtctgtgcccagcatacccggcctgaaccgcacacagctggtcaagctggccatttttggccccccttggatggcattcaaggagaggaaggtgtgggtgaaagagaatatggtgttgaatctgtcttgtgaagcgtcagggcacccccggcccaccatctcctggaacgtcaacggcacggcaagtgaacaagaccaagatccacagcgagtcctgagcaccctgaatgtcctcgtgaccccggagctgttggagacaggtgttgaatgcacggcctccaacgacctgggcaaaaacaccagcatcctcttcctggagctggtcaatttaaccaccctcacaccagactccaacacaaccactggcctcagcacttccactgccagtcctcataccagagccaacagcacctccacagagagaaagctgccggagccggagagccggggcgtggtcatcgtggctgtgattgtgtgcatcctggtcctggcggtgctgggcgctgtcctctatttcctctataagaagggcaagctgccgtgcaggcgctcagggaagcaggagatcacgctgcccccgtctcgtaagaccgaacttgtagttgaagttaagtcagataagctcccagaagagatgggcctcctgcagggcagcagcggtgacaagagggctccgggagaccagggagagaaatacatcgatctgaggcattagccccgaatcacttcagctcccttccctgcctggaccattcccagctccctgctcactcttctctcagccaaagcctccaaagggactagagagaagcctcctgctcccctcacctgcacaccccctttcagagggccactgggttaggacctgaggacctcacttggccctgcaagccgcttttcagggaccagtccaccaccatctcctccacgttgagtgaagctcatcccaagcaaggagccccagtctcccgagcgggtaggagagtttcttgcagaacgtgttttttctttacacacattatggctgtaaatacctggctcctgccagcagctgagctgggtagcctctctgagctggtttcctgccccaaaggctggcttccaccatccaggtgcaccactgaagtgaggacacaccggagccaggcgcctgctcatgttgaagtgcgctgttcacacccgctccggagagcaccccagcggcatccagaagcagctgcagtgttgctgccaccaccctcctgctcgcctcttcaaagtctcctgtgacattttttctttggtcagaagccaggaactggtgtcattccttaaaagatacgtgccggggccaggtgtggtggctcacgcctgtaatcccagcactttgggaggccgaggcgggcggatcacaaagtcaggacgagaccatcctggctaacacggtgaaaccctgtctctactaaaaatacaaaaaaaaattagctaggcgtagtggttggcacctatagtcccagctactcggaaggctgaagcaggagaatggtatgaatccaggaggtggagcttgcagtgagccgagaccgtgccactgcactccagcctgggcaacacagcgagactccgtctcgaggaaaaaaaaagaaaagacgcgtacctgcggtgaggaagctgggcgctgttttcgagttcaggtgaattagcctcaatccccgtgttcacttgctcccatagccctcttgatggatcacgtaaaactgaaaggcagcggggagcagacaaagatgaggtctacactgtccttcatggggattaaagctatggttatattagcaccaaacttctacaaaccaagctcagggccccaaccctagaagggcccaaatgagagaatggtacttagggatggaaaacggggcctggctagagcttcgggtgtgtgtgtctgtctgtgtgtatgcatacatatgtgtgtatatatggttttgtcaggtgtgtaaatttgcaaattgtttcctttatatatgtatgtatatatatatatgaaaatatatatatatatgaaaaataaagcttaattgtcccagaaaatcatacattgcttttttattctacatgggtaccacaggaacctgggggcctgtgaaactacaaccaaaaggcacacaaaaccgtttccagttggcagcagagatcaggggttacctctgcttctgagcaaatggctcaagctctaccagagcagacagctaccctacttttcagcagcaaaacgtcccgtatgacgcagcacgaagggcctggcaggctgttagcaggagctatgtcccttcctatcgtttccgtccactt

SEQ ID NO: 109 - DNA, 1203 bp, Homo sapiens
agaaagccgcgcacctcctcccgccaggcgctttctcggacgccttgcccagcgggccgcccgaccccctgcaccatggaccccgctcgccccctggggctgtcgattctgctgcttttcctgacggaggctgcactgggcgatgctgctcaggagccaacaggaaataacgcggagatctgtctcctgcccctagactacggaccctgccgggccctacttctccgttactactacgacaggtacacgcagagctgccgccagttcctgtacgggggctgcgagggcaacgccaacaatttctacacctgggaggcttgcgacgatgcttgctggaggatagaaaaagttcccaaagtttgccggctgcaagtgagtgtggacgaccagtgtgaggggtccacagaaaagtatttctttaatctaagttccatgacatgtgaaaaattcttttccggtgggtgtcaccggaaccggattgagaacaggtttccagatgaagctacttgtatgggcttctgcgcaccaaagaaaattccatcattttgctacagtccaaaagatgagggactgtgctctgccaatgtgactcgctattattttaatccaagatacagaacctgtgatgctttcacctatactggctgtggagggaatgacaataactttgttagcagggaggattgcaaacgtgcatgtgcaaaagctttgaaaaagaaaaagaagatgccaaagcttcgctttgccagtagaatccggaaaattcggaagaagcaattttaaacattcttaatatgtcatcttgtttgtctttatggcttatttgcctttatggttgtatctgaagaataatatgacagcatgaggaaacaaatcattggtgatttattcaccagtttttattaatacaagtcactttttcaaaaatttggatttttttatatataactagctgctattcaaatgtgagtctaccatttttaatttatggttcaactgtttgtgagactgaattcttgcaatgcataagatataaaagcaaatatgactcactcatttcttggggtcgtattcctgatttcagaagaggatcataactgaaacaacataagacaatataatcatgtgcttttaacatatttgagaataaaaaggactagcaaataaaacacaaaaaaaaaaaaaaaaaaaaaaaaaaaaaaa

SEQ ID NO: 110 - DNA, 817 bp, Homo sapiens
agtcctgcgtccgggccccgaggcgcagcagggcaccaggtggagcaccagctacgcgtggcgcagcgcagcgtccctagcaccgagcctcccgcagccgccgagatgctgcgaacagagagctgccgccccaggtcgcccgccggacaggtggccgcggcgtccccgctcctgctgctgctgctgctgctcgcctggtgcgcgggcgcctgccgaggtgctccaatattacctcaaggattacagcctgaacaacagctacagttgtggaatgagatagatgatacttgttcgtcttttctgtccattgattctcagcctcaggcatccaacgcactggaggagctttgctttatgattatgggaatgctaccaaagcctcaggaacaagatgaaaaagataatactaaaaggttcttatttcattattcgaagacacagaagttgggcaagtcaaatgttgtgtcgtcagttgtgcatccgttgctgcagctcgttcctcacctgcatgagagaagaatgaagagattcagagtggacgaagaattccaaagtccctttgcaagtcaaagtcgaggatattttttattcaggccacggaatggaagaaggtcagcagggttcatttaaaatggatgccagctaattttccacagagcaatgctatggaatacaaaatgtactgacattttgttttcttctgaaaaaaatccttgctaaatgtactctgttgaaaatccctgtgttgtcaatgttctcagttgtaacaatgttgtaaatgttcaatttgttgaaaattaaaaaatctaaaaataaa

SEQ ID NO: 111 - DNA, 1371 bp, Homo sapiens
gctgacgcatcgcgcccaagatggcggcgcggtcgtcgtcgggggtggcggcggcagagggggcggcggccctggcggcagcggagacggcagccgtgacggtggcagcggcggcgcgggacctgggcctgggggaatgaggcggccgcggcgggccagcggcggagccgtgtagcggagaagctccccctccctgcttcccttggccgagccgggggcgcgcgcgcacgcggccgtccagagcgggctccccacccctcgactcctgcgacccgcaccgcacccccacccgggcccggaggatgatgaagctcaagtcgaaccagacccgcacctacgacggcgacggctacaagaagcgggccgcatgcctgtgtttccgcagcgagagcgaggaggaggtgctactcgtgagcagtagtcgccatccagacagatggattgtccctggaggaggcatggagcccgaggaggagccaagtgtggcagcagttcgtgaagtctgtgaggaggctggagtaaaagggacattgggaagattagttggaatttttgagaaccaggagaggaagcacaggacgtatgtctatgtgctcattgtcactgaagtgctggaagactgggaagattcagttaacattggaaggaagagggaatggtttaaaatagaagacgccataaaagtgctgcagtatcacaaacccgtgcaggcatcatattttgaaacattgaggcaaggctactcagccaacaatggcaccccagtcgtggccaccacatactcggtttctgctcagagctcgatgtcaggcatcagatgactgaagacttcctgtaagagaaatggaaattggaaactagactgaagtgcaaatcttccctctcaccctggctctttccacttctcacaggcctcctctttcaaataaggcatggtgggcagcaaagaaagggtgtattgataatgttgctgtttggtgttaagtgatggggctttttcttctgtttttattgagggtgggggttgggtgtgtaatttgtaagtacttttgtgcatgatctgtccctccctcttcccacccctgcagtcctctgaagagaggccaacagccttcccctgccttggattctgaagtgttcctgtttgtcttatcctggccctggccagacgttttctttgatttttaattttttttttttattaaaagataccagtatgagatgaaaacttccaataatttgtcctataatgtgctgtacagttcagtagagtggtcactttcactgcagtatacatttatctacacattatatatcggacatataatatgtaaataaatgacttctagaaagaaaaaaaaaaaaaaaaaa

SEQ ID NO: 112 - DNA, 1336 bp, Homo sapiens
gtcagtcgcgagcgaacgaccaagagggtgttcgactgctagagccgagcgaagcgatgcctaaatcaaaggaacttgtttcttcaggctcttctggcagtgattctgacagtgaggttgacaaaaagttaaagaggaaaaagcaagttgctccagaaaaacctgtaaagaaacaaaagacaggtgagacttcgagagccctgtcatcttctaaacagagcagcagcagcagagatgataacatgtttcagattgggaaaatgaggtacgttagtgttcgcgattttaaaggcaaagtgctaattgatattagagaatattggatggatcctgaaggtgaaatgaaaccaggaagaaaaggtatttctttaaatccagaacaatggagccagctgaaggaacagatttctgacattgatgatgcagtaagaaaactgtaaaattcgagccatataaataaaacctgtactgttctagttgttttaatctgtctttttacattagcttttgttttctaaatgttctccaagctattgtatgtttggattgcagaagaatttgtaagatgaatacttttttttaatgtgcattattaaaaatattgagtgaagctaattgtcaactttattaaggattactttgtctgcccaccacctagtgtaaaataaaatcaagtaatacaatcttaactgttgtggccttttttgatcataagagttggtactgtttaaggccaaaagtaacagtttttatagatcttttagtttcaactcagcttttacaataaaaaggatttgtattgcattgagtttataaacttttggtttgtgaacttcatatttgatcttttctcttccaatcaaatgtctaggcttgtttgacttccacccccaatggtttttcactctttttatttacttcattttcctttaataacttaatctcttcatgttcagtttttacttcactctttattcttttctttgattatggtatgcttatttggaaagtcagtgaaactgtcaaaatgttatctcaataagatacttatatgagaactacaatcaccgaatctactgtattcaatattagcagatctaatttgataaacaacatggcttgtgtgaaaactgagcaggtgtttgtttacccatagtgttctgtgtagttattgcttagtctgcagaaaataatgacttagatgagatgtctgacttgctttcacttattaaacatgttcaccatgggatgatgtctgtaacatcagatattgttcaactagactaggatttaataaaaattgtgaaagcttaaaaaaaaaaaaaaaaaaaaaaaa

SEQ ID NO: 113 - DNA, 2060 bp, Homo sapiens
ctggcttcggcctcagccccaccatggtgacgcttgctgaactgctggtgctcctggccgctctcctggccacggtctcgggctatttcgttagcatcgacgcccatgctgaagagtgcttctttgagcgggtcacctcgggcaccaagatgggcctcatcttcgaggtggcggagggcggcttcctggacatcgacgtggagattacaggaccagataacaaaggaatttacaaaggagacagagaatccagtgggaaatacacatttgctgctcacatggatggaacatacaaattttgttttagtaaccggatgtccaccatgactccaaaaatagtgatgttcaccattgatattggggaggctccaaaaggacaagatatggaaacagaagctcaccagaacaagctagaagaaatgatcaatgagctagcagtggcgatgacagctgtaaagcacgaacaggaatacatggaagtccgggagagaatacacagagccatcaacgacaacacaaacagcagagtggtcctttggtccttctttgaagctcttgttctagttgccatgacattgggacagatctactacctgaagagattttttgaagtccggagagttgtttaaaaagcctcttcctgatgatcccaactcagaattcactgtttaccaaacaccttggtcataataatgtcattagtttctccatttttattttctgaactgtacattcacaacttatgtttctttgagattaatagatattgggggaaaaacgcctttttaggaaaattatagtgaaaatttgacagttgattggcataatttcttgtttgaatgctgcctccattatataggtccttccaggaactcaaacactgtaagtgaaatatgggagtatagtttttattatttcttcttttccttttgttttcataatataatgcagtttgttcaggaaatcagcacaaagcctgatagtactttactaaaatgactgcattctttggattccttcagtctatggttcaagtcactaaagattcatttttgttgagtccttatgagaaacagcagtatgaatcttgacggtttctgcccgtcctaatggcagagctctctgacttgggtgtatgctgccaggctgggtactttcatactttgttttcttgttttgctttaaaactacgactcagcatacattttcccacatacatttttacattgtaccttaggactcagtcatctccacttaaattgatgacacaagcagctaataaccatttctgggtttctgcctaaccccctaattgtctgttaaagccaattctctgggtgtcccagtgagtggtggctttttttctttccacattggcacattcacttctcccactcttggcatgtaagaaataagcatttacataattggaaaaatctggatttctgatgccaaagggttaaagcttcttggatttcatttcattgatatacagccactattttatttttgatcagtggcctttgggccactgttcagggtactgaccatcagtgtcagcattagggttttggtttttgtttcttttgggtatttcttttttggcacatgtgaatcttgttttgtgtaaaatgaaattactttctcttgttctctgatgatgggtttaaaattaaaagagcatccggttttggtatggggatgatccaggattatgttgtgactgatacatattagttacttgtgctttttttttttttttttggatctttgcaagggcaaaactacaagtaacgagttttatataattaatttaaatttgttacaggttttcatgttcaggataaaccatacttccaccttgggtgagaacacttgcaacagtttattaatgaggtgactttcaccttaggacaactgttgcatgccaagttttttgtgtgtgtgaaacacttcaaaactgatttaaaagatgtaaatttaaaattggttgtatctaatatgccccaggttcggtaaataaacaattctttttaaaaaaaaaaaaaaaaaaaaaaaaa

SEQ ID NO: 114 - DNA, 1721 bp, Homo sapiens
ggctcccacaccactgcctcgtgtggggttgttcgcccgtgaaggggcaggacagggtgcgcgctggtggaggttgaaattgttacattttggccgggcgcggtggctcacgcctgtaatcccagcactttgggaggccgaggcaggtggatcgcgaggtcaggagatcgagaccatcctggctggcacggtgaaaccccgtctctactaaaaaaatgcaaggaatcggccgggcgtggtgacgggcgcctgtggtcccagctgctcgggaggctgaggcaggaggatggcgtgaacccgggaggcggagcttgcagtgagccgagatcgcgccagtgcactccagcctgggcgacagagcgaaactacgtctcaaaaaaaaaaaaaaagaaagaaaagaaattgttacattttatatatataggaacaatcctgcaccatgactcaacagccacttcgaggagtgaccagcctgcgtttcaaccaagaccaaagctgcttttgctgcgccatggagacaggtgtgcgcatctacaacgtggagcccttgatggagaaggggcatctggaccacgagcaggtgggcagcatgggcttggtggagatgctgcaccgctccaaccttctggccttggtgggcggtggtagtagtcccaagttctcagagatctcagcagtgctgatctgggacgatgcccgggagggcaaggactccaaggagaagctggtgctggagttcaccttcaccaagccagtgctttctgtgcgcatgcgccatgacaagatcgtgatcgtgctgaagaaccgcatctatgtgtactccttccccgacaatccccgaaagctgtttgagtttgatacccgggacaaccccaaggggctctgtgacctctgccccagcctggagaagcaactgctagtgttcccgggacacaagtgtgggagtctgcaacttgtggacctggcgagcacaaagcctggcacctcgtctgctccattcacgatcaatgcacatcagagtgacatagcctgtgtgtctctaaaccagccaggcactgtagtggcctcagcctcccagaagggtacccttattcgcctctttgacacacaatccaaggagaaactggtggagctgcgccgaggcactgaccctgccaccctctactgcattaacttcagccacgactcctccttcctctgcgcttccagtgataagggtactgtccatatctttgctctcaaggatacccgcctcaaccgccgctccgcgctggctcgcgtgggcaaggtggggcctatgattgggcagtacgtggactctcagtggagcctggcgagcttcactgtgcctgctgagtcagcttgcatctgcgccttcggtcgcaatacttccaagaacgtcaactctgtcattgccatctgcgtagatgggaccttccacaaatatgtcttcactcctgatggaaactgcaacagagaggctttcgacgtgtaccttgacatctgtgatgatgatgacttttaaggaccctgggggctgtgctagggacctgcagtggcagaactgcagagctgagccttggcagtggggcgtgcttggaagccaccagccagcaagcattaatggggctggtgcccactttccactcagcagagctatgtctaaataaagagctcacttccccccaaaaaaaaaaaaaaaaaaaaaaaaaaaaaaaaaa

SEQ ID NO: 115 - DNA, 2394 bp, Homo sapiens
cgggagatccagaagtgaaacgccaggctctctggaggccaggagatgactctgttgacgttcagggatgtggccatagaattctccctggaggagtggaaatgcctggacctcgctcagcagaatttgtacagggatgtgatgttggagaactacagaaacttgttctccgttggtctcactgtctgtaagccaggcctgatcacctgcctggagcaacgaaaagagccctggaatgtgaagagacaggaggcagcagacggacatccagagatgggatttcaccatgctactcaggcttgtcttgaactcctgggctcaagcgatctgcctgcctcagcctcccaaagtgctgggattacaggtgtgaaccaccgtgcccagccaggcctcaatgtttctgtggacaaattcactgcactgtgctcacctggggtgctgcaaactgtgaaatggtttttagagttcagatgcatcttctcactagctatgtcttctcattttacccaagaccttctgccagagcagggcatacaagatgcattcccaaaaagaatactgagaggatatggaaattgtggccttgataatttatatttaaggaaagactgggaaagtttagatgagtgtaagttgcaaaaagattataatggacttaaccaatgttcatcaactacccatagcaaaatctttcaatataataaatatgttaaaatctttgataacttttcaaatttacatagacgtaatataagtaatactggagagaaacctttcaaatgtcaagaatgtggcaaatcctttcaaatgctctcattcctaactgaacatcagaaaattcacactggaaaaaaattccaaaaatgtggagaatgtggcaaaacctttatccagtgctcacactttactgaacctgagaacattgacactggagagaaaccttacaagtgtcaagaatgtaacaacgtcattaaaacttgctcagtccttactaaaaatagaatttatgccggaggggaacattacagatgtgaagaatttggcaaagtatttaaccagtgctcccaccttactgaacatgagcatggtactgaggaaaaaccctgcaaatatgaagagtgcagcagtgtctttatctcttgctcaagcctttctaatcaacagatgattcttgctggagagaagctctccaaatgtgaaacatggtacaaaggttttaaccacagcccaaatccttccaaacaccagagaaatgagattggagggaaacctttcaaatgtgaggaatgtgacagcatcttcaagtggttctcagaccttactaaacataagagaattcacactggtgagaaaccatacaaatgtgacgaatgtgggaaagcctatacacagtcctcacacctcagtgaacacaggaggattcacaccggagagaaaccctaccaatgtgaagaatgtgggaaggtcttcagaacttgctcaagcctttctaaccataagagaactcattctgaagaaaaaccctacacgtgtgaagaatgtggcaacatctttaagcagttatcagacctcactaagcataagaaaacccatactggagagaagccctacaaatgtgacgaatgtggaaaaaactttacccagtcctccaaccttattgtacataagagaattcatactggagagaaaccctacaagtgtgaagaatgtggcagagccttcatgtggttctcagacattaccaaacataagcaaacccatactggagagaaaccctacaaatgtgacgaatgtggcaaaaactttacccagtcctcaaaccttattgtacataagagaattcatactggagagaaaccctacaagtgtgaaaagtgtggcaaagccttcacccagttctcacacctgactgtacatgaaagcattcatacttgagaaaaaaataaacaaatataaaaataggcaaagccgttagtatctgctcgcatcccactttacatcagagttcagacttaataaagttatcataaatgtaattactattgaaagacctttcatgaaatataagtctccagagcacacaagagtatttcttctgaaaaaaatgttacaattatactagatggaagacttgcatcagttgcttaaactttcagaaaatttgtagagaaacccaacaaatctcataaatgtggaataacatttgttcaaaaatgatagcttagaaaacactagagttcatactaaaagatattttgcaaatacactaaatggaaaaataagcaaaatccaatttaagtaaacaatggaggatttgaaggagaaaggaatagagcacggacacgttcagaaatgacactgaatccctgtgttgagtctacagagacatctaga

SEQ ID NO: 116 - DNA, 5132 bp, Homo sapiens
gcggcggtggcggcggagacccgaacatggcgaccgcgcgcaccttcgggcccgagcgggaagccgagccggccaaggaagcgcgcgtcgtgggctcggagcttgtggacacttatacggtttacatcatccaggtcactgatggcagccatgagtggacagtaaagcaccgctacagcgacttccatgacctgcatgaaaagctcgttgcagagagaaagattgataaaaacctgcttccgcccaaaaagataattgggaaaaactcaagaagcttggtggagaagagggagaaggatctggaggtctacctccagaagctcctggctgccttccctggcgtgacccccagagtactggcccacttcttgcattttcacttctatgagataaatggcatcaccgcggcactggctgaagagctctttgagaaaggagaacagctcctgggggccggcgaggtctttgccattggacccctgcagctgtatgccgtcacggagcagctgcagcagggaaagcccacgtgcgccagtggggatgccaagaccgacctcgggcacatcctggacttcacctgtcgccttaagtaccttaaggtttctggcacagaaggaccttttgggaccagcaacattcaggagcagctcctgccgttcgacctatcaatattcaagtccctgcatcaggtggagataagtcactgtgatgctaagcacatcagagggctggtcgcatcgaagcccaccttagccacgctgagtgtccgcttctcagcaacctcgatgaaggaagtccttgttcctgaagcctcagaatttgatgagtgggagcctgaaggcacaaccctagaaggccctgtgactgccgtcatccccacttggcaggcattgaccacgcttgacctgagccacaacagcatctccgagatcgacgagtctgtgaaactgatcccaaagattgagttcctggacctgagtcacaatggattgctggttgtggacaatctgcagcacctgtataaccttgtgcatctggacctgtcctacaacaagctctcctccttggaagggcttcacaccaagctggggaacatcaagaccttaaacctggcaggcaacctcctagagagtctgagtggcctgcacaagctctactcactggtcaacctggatctccgggacaacaggatcgaacagatggaggaggtccggagcataggcagcctcccgtgtctggagcacgtgtctctgctgaacaaccctctgagcatcatccccgactaccggaccaaggtgctggctcagttcggagagagggcctcagaggtctgtctggatgacacagtgaccacagagaaggagctggacactgtggaagtgctgaaagcaattcagaaagccaaggaggtcaagtccaaactgagcaacccagagaagaagggtggtgaagactcccggctctcagctgccccctgcatcagacccagcagctcccctcccactgtggctcccgcatctgcctccctgccccagcccatcctctctaaccaaggaatcatgttcgttcaggaggaggccctggccagcagcctctcgtccactgacagtctgactcccgagcaccagcccattgcccagggatgttctgattccttggagtccatccctgcgggacaggcagcttccgatgatttaagggacgtgccaggagctgttggtggtgcaagcccagaacatgccgagccggaggtccaggtggtgccggggtctggccagatcatcttcctgcccttcacctgcattggctacacggccaccaatcaggacttcatccagcgcctgagcacactgatccggcaggccatcgagcggcagctgcctgcctggatcgaggctgccaaccagcgggaggagggccagggtgaacagggcgaggaggaggatgaggaggaggaagaagaggaggacgtggctgagaaccgctactttgaaatggggcccccagacgtggaggaggaggagggaggaggccagggggaggaagaggaggaggaagaggaggatgaagaggccgaggaggagcgcctggctctggaatgggccctgggcgcggacgaggacttcctgctggagcacatccgcatcctcaaggtgctgtggtgcttcctgatccatgtgcagggcagtatccgccagttcgccgcctgccttgtgctcaccgacttcggcatcgcagtcttcgagatcccgcaccaggagtctcggggcagcagccagcacatcctctcctccctgcgctttgtcttttgcttcccgcatggcgacctcaccgagtttggcttcctcatgccggagctgtgtctggtgctcaaggtacggcacagtgagaacacgctcttcattatctcggacgccgccaacctgcacgagttccacgcggacctgcgctcatgctttgcaccccagcacatggccatgctgtgtagccccatcctctacggcagccacaccagcctgcaggagttcctgcgccagctgctcaccttctacaaggtggctggcggctgccaggagcgcagccagggctgcttccccgtctacctggtctacagtgacaagcgcatggtgcagacggccgccggggactactcaggcaacatcgagtgggccagctgcacactctgttcagccgtgcggcgctcctgctgcgcgccctctgaggccgtcaagtccgccgccatcccctactggctgttgctcacgccccagcacctcaacgtcatcaaggccgacttcaaccccatgcccaaccgtggcacccacaactgtcgcaaccgcaacagcttcaagctcagccgtgtgccgctctccaccgtgctgctggaccccacacgcagctgtacccagcctcggggcgcctttgctgatggccacgtgctagagctgctcgtggggtaccgctttgtcactgccatcttcgtgctgccccacgagaagttccacttcctgcgcgtctacaaccagctgcgggcctcgctgcaggacctgaagactgtggtcatcgccaagacccccgggacgggaggcagcccccagggctcctttgcggatggccagcctgccgagcgcagggccagcaatgaccagcgtccccaggaggtcccagcagaggctctggccccggccccagtggaagtcccagctccagcccctgcagcagcctcagcctcaggcccagcgaagactccggccccagcagaggcctcaacttcagctttggtcccagaggagacgccagtggaagctccagccccacccccagccgaggcccctgcccagtacccgagtgagcacctcatccaggccacctcggaggagaatcagatcccctcgcacttgcctgcctgcccgtcgctccggcacgtcgccagcctgcggggcagcgccatcatcgagctcttccacagcagcattgctgaggttgaaaacgaggagctgaggcacctcatgtggtcctcggtggtgttctaccagaccccagggctggaggtgactgcctgcgtgctgctctccaccaaggctgtgtactttgtgctccacgacggcctccgccgctacttctcagagccactgcaggatttctggcatcagaaaaacaccgactacaacaacagccctttccacatctcccagtgcttcgtgctaaagcttagtgacctgcagtcagtcaatgtggggcttttcgaccagcatttccggctgacgggttccaccccgatgcaggtggtcacgtgcttgacgcgggacagctacctgacgcactgcttcctccagcacctcatggtcgtgctgtcctctctggaacgcacgccctcgccggagcctgttgacaaggacttctactccgagtttgggaacaagaccacagggaagatggagaactacgagctgatccactctagtcgcgtcaagtttacctaccccagtgaggaggagattggggacctgacgttcactgtggcccaaaagatggctgagccagagaaggccccagccctcagcatcctgctgtacgtgcaggccttccaggtgggcatgccaccccctgggtgctgcaggggccccctgcgccccaagacactcctgctcaccagctccgagatcttcctcctggatgaggactgtgtccactacccactgcccgagtttgccaaagagccgccgcagagagacaggtaccggctggacgatggccgccgcgtccgggacctggaccgagtgctcatgggctaccagacctacccgcaggccctcaccctcgtcttcgatgacgtgcaaggtcatgacctcatgggcagtgtcaccctggaccactttggggaggtgccaggtggcccggctagagccagccagggccgtgaagtccagtggcaggtgtttgtccccagtgctgagagcagagagaagctcatctcgctgttggctcgccagtgggaggccctgtgtggccgtgagctgcctgtcgagctcaccggctagcccaggccacagccagcctgtcgtgtccagcctgacgcctactggggcagggcagcaggcttttgtgttctctaaaaatgttttatcctccctttggtaccttaatttgactgtcctcgcagagaatgtgaacatgtgtgtgtgttgtgttaattctttctcatgttgggagtgagaatgccgggcccctcagggctgtcggtgtgctgtcagcctcccacaggtggtacagccgtgcacaccagtgtcgtgtctgctgttgtgggaccgttgttaacacgtgacactgtgggtctgactttctcttctacacgtcctttcctgaagtgtcgagtccagtcctttgttgctgttgctgttgctgttgctgttgctgttggcatcttgctgctaatcctgaggctggtagcagaatgcacattggaagctcccaccccatattgttcttcaaagtggaggtctcccctgatccagacaagtgggagagcccgtgggggcaggggacctggagctgccagcaccaagcgtgattcctgctgcctgtattctctattccaataaagcagagtttgacaccgtcttaaaaaaaaa

SEQ ID NO: 117 - DNA, 1541 bp, Homo sapiens
cgcgcgagcggcgccagctcggggcagcggaacccagagaagctgagggggcggtagcggcggcgacggcgacgacgacgactcccgcgcgtgtgcccagcctcttcccgccgcagccgcccttttcctccctcccttacgtccccgagtgcggcagtaccgcctccttcccagccgcgcggcttcctccagacctctcggcgcgggtgagccctattcccagaggcaggtggtgctgaccctgtaacccaaaggaggaaacagctggctaagctcatcattgttactggtgggcaccatgtccttgaagcttcaggcaagcaatgtaaccaacaagaatgaccccaagtccatcaactctcgagtcttcattggaaacctcaacacagctctggtgaagaaatcagatgtggagaccatcttctctaagtatggccgtgtggccggctgttctgtgcacaagggctatgcctttgttcagtactccaatgagcgccatgcccgggcagctgtgctgggagagaatgggcgggtgctggccgggcagaccctggacatcaacatggctggagagcctaagcctgacagacccaaggggctaaagagagcagcatctgccatatacaggctcttcgactaccggggccgtctgtcgcccgtgccagtgcccagggcggtccctgtgaagcgaccccgggtcacagtccctttggtccggcgtgtcaaaactaacgtacctgtcaagctctttgcccgctccacagctgtcaccaccagctcagccaagatcaagttaaagagcagtgagctgcaggccatcaagacggagctgacacagatcaagtccaatatcgatgccctgctgagccgcttggagcagatcgctgcggagcaaaaggccaatccagatggcaagaagaagggtgatggaggtggcgccggcggcggcggcggtggtggtggcagcggtggcggtggcagtggtggtggcggtggcggtggcagcagccggccaccagccccccaagagaacacaacttctgaggcaggcctgccccagggggaagcacggacccgagacgacggcgatgaggaagggctcctgacacacagcgaggaagagctggaacacagccaggacacagacgcggatgatggggccttgcagtaagcagcctgacaggagcaatggccaccagcaggtgaagggcatcgctgccccaggcctcaagccgggcacccaaccctggatgccaccccccagcgggtaccagaggaaagctggcagcaggcgcctcctcccccaacgcatcccagccagtgccatgtcctctgcaggtggagttactggcctactccttccccatgagccctccctgtctgcactgcccaggccagagggtagagcacaggggtttccccatactacctcccctccccaggacactcccaggcttgggttttttctataggtttggcggggggccacagggaggggaccctgacaataaagagattggatcccaaaaaaaaaaaaaaaa

SEQ ID NO: 118 - DNA, 1963 bp, Homo sapiens
gtgttgtacgaaagcgcgtctgcggccgcaatgtctgctgagagttgtagttctgtgccctatcacggccactcccatttctggtgccgtcacgggacagagcagtcggtgacaggacagagcagtcggtgacgggacacagtggttggtgacgggacagagcggtcggtgacagcctcaagggcttcagcaccgcgcccatggcagagccagacccctctcaccctctggagacccaggcagggaaggtgcaggaggctcaggactcagattcagactctgagggaggagccgctggtggagaagcagacatggacttcctgcggaacttattctcccagacgctcagcctgggcagccagaaggagcgtctgctggacgagctgaccttggaaggggtggcccggtacatgcagagcgaacgctgtcgcagagtcatctgtttggtgggagctggaatctccacatccgcaggcatccccgactttcgctctccatccaccggcctctatgacaacctagagaagtaccatcttccctacccagaggccatctttgagatcagctatttcaagaaacatccggaacccttcttcgccctcgccaaggaactctatcctgggcagttcaagccaaccatctgtcactacttcatgcgcctgctgaaggacaaggggctactcctgcgctgctacacgcagaacatagataccctggagcgaatagccgggctggaacaggaggacttggtggaggcgcacggcaccttctacacatcacactgcgtcagcgccagctgccggcacgaatacccgctaagctggatgaaagagaagatcttctctgaggtgacgcccaagtgtgaagactgtcagagcctggtgaagcctgatatcgtcttttttggtgagagcctcccagcgcgtttcttctcctgtatgcagtcagacttcctgaaggtggacctcctcctggtcatgggtacctccttgcaggtgcagccctttgcctccctcatcagcaaggcacccctctccacccctcgcctgctcatcaacaaggagaaagctggccagtcggaccctttcctggggatgattatgggcctcggaggaggcatggactttgactccaagaaggcctacagggacgtggcctggctgggtgaatgcgaccagggctgcctggcccttgctgagctccttggatggaagaaggagctggaggaccttgtccggagggagcacgccagcatagatgcccagtcgggggcgggggtccccaaccccagcacttcagcttcccccaagaagtccccgccacctgccaaggacgaggccaggacaacagagagggagaaaccccagtgacagctgcatctcccaggcgggatgccgagctcctcagggacagctgagccccaaccgggcctggccccctcttaaccagcagttcttgtctggggagctcagaacatcccccaatctcttacagctccctccccaaaactggggtcccagcaaccctggcccccaaccccagcaaatctctaacacctcctagaggccaaggcttaaacaggcatctctaccagccccactgtctctaaccactcctgggctaaggagtaacctccctcatctctaactgcccccacggggccagggctaccccagaacttttaactcttccaggacagggagcttcgggcccccactctgtctcctgcccccgggggcctgtggctaagtaaaccatacctaacctaccccagtgtgggtgtgggcctctgaatataacccacacccagcgtagggggagtctgagccgggagggctcccgagtctctgccttcagctcccaaagtgggtggtgggcccccttcacgtgggacccacttcccatgctggatgggcagaagacattgcttattggagacaaattaaaaacaaaaacaactaac

SEQ ID NO: 119 - DNA, 1510 bp, Homo sapiens
cggcgctggaggctgcgttcggcaggcgctgcggagacgcgtagaggagcgcgccccccggccgctgccgcccctggcccgtgccgtcaccccgcttctccgcgcctcgggcggtacccagccagtccccagcgccgcgctaccgcgctgaccggccctccagacgcctcccggtacccgggaccccagcccggccgctcgcccgcagcccgccggccgcacacgtccccggagccgggcctagggcgggcggcagcggcggctcggcgcagtcaggctgggctctgtagcgtccccatggccgcggccggctggcgggacggctccggccaggagaagtaccggctcgtggtggtcggcgggggcggcgtgggcaagtcggcgctcaccatccagttcatccagtcctattttgtaacggattatgatccaaccattgaagattcttacacaaagcagtgtgtgatagatgacagagcagcccggctagatattttggatacagcaggacaagaagagtttggagccatgagagaacagtatatgaggactggcgaaggcttcctgttggtcttttcagtcacagatagaggcagttttgaagaaatctataagtttcaaagacagattctcagagtaaaggatcgtgatgagttcccaatgattttaattggtaataaagcagatctggatcatcaaagacaggtaacacaggaagaaggacaacagttagcacggcagcttaaggtaacatacatggaggcatcagcaaagattaggatgaatgtagatcaagctttccatgaacttgtccgggttatcaggaaatttcaagagcaggaatgtcctccttcaccagaaccaacacggaaagaaaaagacaagaaaggctgccattgtgtcattttctagaatcccttcagttttagctaccaacggccaggaaaagccctcatcttctctttctctcctcagtttacatcttgttggtacctttctagccttagacaaatgatcaccatgttagccttagaccaagaagctggctagtcctttctgtgaagctaatacaatggtcatttccagacaaatttaaaggaaacactaaggctgcttcaaagattatctgattcctttaaaatatatgtctatatacacagacatgctctttttttaagtgcttacattttaatagagatgaatcagttttggaatctaagctgtttgccaagctgaagctacaggttgtgaaataatttttaacttttggaatcatactgcctactgttactctaaatagaaatatagggttttttttaatgtgaatttttgcctatctttaaacatttcaatgtcagcctttgttaaccttaaatacactgaattgaatctacaaaagtgaaccatctcagacctttactgatactacaacttttgttttctgatggccaaaataccaaatgcctgttgtatttatggattaaaaactgcttataaaaaaaaaaaaaaa

SEQ ID NO: 120 - DNA, 3984 bp, Homo sapiens
atattgtctactgaaagctgccgctgaagctgccgccgttgcctccgccgccaagagtgagcgagcggacccgcgatggagaccatggcgagcccagggaaagacaattatcgaatgaagagctataagaacaatgctctaaaccctgaagaaatgagacgaagaagagaggaagagggcattcagctccggaagcagaagcgagagcaacaactttttaaacggagaaatgtggagctgattaatgaagaagctgccatgttcgatagtcttctcatggactcttatgtgagctctaccactggggagagtgtgatcacaagagagatggtggagatgctcttttctgatgattctgacctgcagttagcaaccacacagaaattccggaaactgctctccaaagagcctagtcctccaatagatgaagttatcaacactccaagagtggtggatcggttcgtggagtttctgaagaggaatgagaattgtacattacagtttgaagctgcctgggctctaacgaatattgcctctggaacctctcagcagaccaaaattgtcattgaagcaggggctgtccccatttttatagagctgcttaattcagactttgaggatgttcaggaacaggcagtctgggcactgggaaacatagctggagatagctctgtttgccgagattacgtcttgaactgttccatccttaatcctttgttaacactccttaccaagtccacacgactgacgatgacacggaatgcagtctgggccctgtcaaatctctgccgagggaaaaacccacccccagagtttgcaaaggtctctccttgtttgcctgtactgtctcgcctactcttcagcagcgactcggacttgctggcagatgcttgctgggccctttcttatctgtctgatggccccaatgagaagatccaggcagtcatagactccggagtctgccggagattggtagagctgctgatgcacaatgattacaaagtggcttctcctgccctgagagccgtgggtaacatcgtcactggggatgacatccagacccaggtcattcttaactgttcagccctaccttgccttctccacttgttgagcagtcccaaggagtcaatccggaaggaagcttgctggactatttcaaatattactgctggcaacagggctcaaatacaggctgttatagatgcaaatatcttccctgtgttgatcgaaatccttcagaaagcagagtttcgtacaaggaaagaggcagcctgggccatcaccaatgccacatcaggaggaacccctgagcagatcaggtacctggtctcactgggctgcatcaaacccctatgtgacttgctgactgtaatggattcgaagattgtgcaagtggccctcaatggactggagaacatcctgcggcttggagagcaagagggcaagcgcagtggctcaggggtcaatccttattgtggcctcatagaggaagcctatggcttggataaaattgagtttctccagagccacgagaaccaggagatctaccagaaggccttcgacctcattgagcactactttggtgtagaagacgatgatagcagcctggctccccaagtcgatgaaacgcaacagcagttcatcttccagcagcctgaggcccccatggagggcttccagctataatatctgcctccagggaggggaggggatgggaagcaccaccagccagcggaagagcagccctctggtgggcgggaaaccagtgtccccaccatcagccaccacacacctctgctgccctggagactgtgctcttgacctgctccgcccccttccctggagggagcaccctctggacagacagaaccatctgaggctcacctttgggttttgtgacaagaaggggacgtgttgggtttttcttccttacactatattttggctgcacacatgtctttaacccaggagcccaggggtagacaaaggaggactaaggtaatcaatttgcacctttttttatttttattttttttctttttttcttcagtggtgacttccttccctttatcttttttcattcttcccggtcctctgccctgatctgtgtaactcttatcttgggtacttgagcagacggtatattccagaggtgggaggtgggaggggaagggagaaatccaaaacaaagtgttcttgctctgacagaatattaatcttgtacgcttggattgagttatttaatttttttttcttttgcacatttttcttgtattaagattgctcttcccaagagccacaagttcctggttttagtaaacccagctgcctgcattgcctgggactagaggctggggaggctaccatgaaacaaaggtccctccctccctctgactctttgcccagacctctttagtttgggggatcctcctcactctcctgaagtgtctcaagtataccagtgggagtgcaggggaggagcacaggccttcagatggggcttcccacgtgtagctactgatcccatatttcctactcaccttccaaatggtgcgacccaacttcatttgtttacttgaaaattccccctcgaggttgagagaacctctgaggtggctgtattttctcctaagcttgagatagggggctgtggtccttcctttctcctgaggagaaagtccttgctctggtgacctgtaagttgcagaggagggtggagtgagagtgtcatgtattgggatagtcagggatccctgcctttggcctttcttcttcttcttcttcctcttccatagttggatcatgtatattttacttctaaaggagagaatgtcaaaaagttctgtatttttttatattctatatattaggtaggtcaatcttaattggtctcaagaggaagaactgtctgtcatttcggtaagtaggatactgtgaggaagaccaaaaagagatatggatgcttcctcgctcaggaggcctgagcttggtccttttcctctctgcttggattctggaccaccacctgggaccaaccttcagctctggaaccttcataaagcaggtcagcgtggcctgattgtcccaggacctgaagggagcaaggatggcctcagggcctggtgaagtctgctactctgtccttactgctgaacatcctgcttgtatcaggaaactcagaagcagtttgccttgtcaaattcaatctcaatggccattgtccacataactgatcacccatggctgcctctcctattatctattatcactgaaacttagtagcctgctttttttttttttttttttagagctattgcgtatcttccctgtttgggatccttgtacctggtttgggttttcccttccttgtgacaattataatccagatgcctcttctttctgtttgaattacggtagtgcattgccttagtggcttgcctgtgcctctgggtggattacatatgatagtaaagcccacctgtttggatgggagtagaggaagttggtgtagaccagctgtggagctgaaggcacagtctgccccacccccacctccccactgtggttagtcagaggcatcctgctccaagctctgcttttccttcctctgaaacaatgccattcttgcttctattgctacacatctccttctggctcaggtgaaatccatgcccttctgcttatagacctaaagttcaggtacttattattggccattgatcttgaatttgccctctcctagtgctgcagtcccacttcaaagccattttctgaggaggatggtttaggtctggcaattgtccttgaaaaatcccacccatgttgtaccaccttggtgagtcatatgccactcatcagcttgggaatgatggctgccaactcccaatctcccaggaaggcagggggcagaatctttttttcacttggcctgctacctccattaaaaaaccattctcttacagtttaaaaaaaaaaaaaaaaaaa

SEQ ID NO: 121 - DNA, 1948 bp, Homo sapiens
ggcttagccgccaccgcgcgcttcggaaggccagagggagggggaggcctgtcagtctcgcgcgttgcctgggcgaagggggcggagctttggcgtggggcggccaatagtgggggtggctgcgtgggtcgccatggggacggggctgttcccggggaggctgtgatgggttgacaggtgcgtgacagtgggagctgctctcggcacaagcatgtacggcaaaggcaagagtaacagcagcgccgtcccgtccgacagccaggcccgggagaagttagcactctacgtatatgaatatctgctccatgtaggagctcagaaatcagctcaaacatttttatcagagataagatgggaaaaaaacatcacattgggggaaccaccaggattcttacattcttggtggtgtgtattttgggatctctactgtgcagctccagagagacgtgaaacatgtgaacactcaagtgaagcaaaagccttccatgattacagtgctgcagcagctcccagtccagtgctaggaaacattcccccaggagatggcatgccagtaggtcctgtaccaccagggttctttcagccttttatgtcacctcggtaccctggaggtccaaggcccccattgaggatacctaatcaggcacttggaggtgtcccaggaagtcagccattactccccagtggaatggatccaactcgacaacaaggacatccaaatatgggtgggccaatgcagagaatgactcctccaagaggaatggtgcccttaggaccacagaactatggaggtgcaatgagacccccactgaatgctttaggtggccctggaatgcctggaatgaacatgggtccaggtggtggtagaccttggccaaacccaacaaatgccaattcaataccatactcctcagcatctcctgggaattatgtaggtcctccaggaggtggagggccaccaggaacacccatcatgcctagtccagcagattcaaccaactctggtgataacatgtatactttaatgaatgcagtacctcctggacctaacagacctaattttccaatgggtcctgggtcagatggtcccatgggtggattaggaggaatggagtcacatcacatgaatggctctttaggctcaggagatatggacagtatttccaagaattctcccaataatatgagcctgagtaatcaaccgggcactccaagggatgatggcgaaatggggggaaatttcttaaatccttttcagagtgagagttactcccctagcatgacaatgagcgtgtgatccattaccaagtctcctcatgaaaaccacagtgagtcagcccttcacagaactactacggaagaaaattattcatcacagtgtacagttaaacaaaggaatctcagtcacaccaaaccaacctttttatttcctgctctctcccctcttttgtgaagaaagcgggtccaaatgtgattcaaacaactgtacggagtggcatattagaattgccctaaactgaactgcaaataattatgtgtgtatgtatatgtgtgggaaagagaatgtactgtatatgtgtatgttatacagacatatacacatacatacattgacccacaggacattgtaaaatattatcacatgacatcttaagtagaaataagtagggacttttattccatcctttttttcacgtttacattttaattattacaagttgctcctgccccctccctgaactattttgtgctgtgtatatcactgctttatataagttattttttaaggtgaactcagatgttatggttttgtaaatgtctgcaatcatggataggaataaaatcgcttatttgagagctttcattaaattgcgtctgatgcaagttatcctgtgaatcacaaagtgtactgtctcaaaaaatagaagaaaatgtgtcttcgtcttta

SEQ ID NO: 122 - DNA, 6620 bp, Homo sapiens
gtccaagatggcggcgccgggggcgctgcctcctcggccgccgcctccgccgccgccgctgtgagaaacctacgggccgcccgcccgccgcgccagcgccatgaagcggcagagcgagcgagactctagcccgagcgggcgcggctcgtcatcgtccgccaagcgtccgcgggagcgcgaacgggaggcggaggcgggcgggcggcgggcggcgcacaaggcctctggcggcgccaagcacccggttccagcgcgggcccgcgacaaaccccgcggcagcggaagcggcgggggcgggcatcgcgacggccgcggcaccggggacgcgaatcaccgcgcgagtagcgggcgctcctcgggctccggcgctggcggcgggggacgcggcggcaaggcctcgggggacccgggcgcctccggcatgtcgccccgcgcgtctcctctgccgccgcctccgccaccgcctggggccgagcccgcgtgtcccggctcatccgcggccgcgcctgagtacaagacgttgctcatcagcagcttgagccccgcgctgcccgccgagcacctcgaggaccggctcttccaccagttcaagcgcttcggcgagatcagcctccgcctgtcgcacacgcctgagctgggccgtgtggcctacgtgaatttccggcacccacaggacgcacgcgaggcccgccagcacgccctggcccggcagctgctgctctacgaccgcccgctcaaggtagagcccgtgtacctgcgtggcggcggcgggagcagtcggcgaagtagcagcagcagcgccgccgcttccacgcctcccccagggccgcccgcgcccgccgacccgctcggctacctcccgctacacggaggctaccagtacaagcagcgctcgctgtcccccgtcgctgccccgcccctgcgggagccccgtgcccgtcacgccgccgcagccttcgccctggatgccgctgctgccgccgccgtgggactgtcccgggagcgggccctggactactacgggctgtacgacgaccgtgggcgcccctatggctacccagctgtgtgtgaggaggacctgatgcccgaggatgaccagcgggccacgcgcaacctcttcattggtaacctggaccacagcgtatctgaggtggagctgcgaagggccttcgagaaatatggcatcatcgaggaggtggtcatcaagaggcctgcccgtggccagggcggtgcctatgccttcctcaagttccagaacctggacatggcccatagggctaaggtggccatgtcgggccgagtgattggtcgcaaccccattaagataggctatggcaaggccaaccccaccactcgtctctgggtgggtggcctgggacctaacacgtcactggcggctctggcccgagagtttgaccgctttgggagcattcggaccattgatcacgtcaaaggagatagctttgcctatattcagtacgagagcttggacgcagcccaggccgcctgtgctaaaatgaggggttttcccttgggtggaccagaccgcaggctccgcgtggattttgccaaagcagaggagactcggtacccccagcagtaccagccctcgccactccctgtgcattatgagctgctcacagatggatacacccggcaccgcaacctggacgccgacctggtgcgggacaggacgcccccacaccttctgtactcagaccgagaccggacttttttggaaggggactggaccagccccagtaaaagctctgaccgccgaaacagccttgagggctacagtcgctcagtgcgcagccggagtggtgagcgttggggggcagatggagaccgtggtttgcccaagccctgggaagagaggcggaaacggagaagcctttccagtgaccgtgggaggacaacccattcaccatatgaggaacggagtaggaccaagggcagtgggcagcagtcagagcggggctccgaccgcacccctgagcgcagccgcaaggagaaccactccagtgaagggaccaaggagtccagcagcaactccctcagcaacagcagacatggggctgaggaacggggccaccaccaccaccaccacgaggctgcagactcttcccacgggaagaaggcaagagacagcgagcgcaatcaccggaccacagaggccgagcccaagcctctggaagagccaaaacacgagaccaaaaagctgaagaatctttcagagtacgctcagacactacagctgggttggaatgggcttctggtgttgaaaaacagctgcttccccacgtctatgcatatcctagagggggaccagggggtgatcagcagtctcctcaaagaccacacttctgggagcaagctgacccagctgaagatcgcccagcgccttcgactggaccagcccaagcttgacgaggtcacacgacgcatcaagcaggggagccccaacggctatgcggtcctcttagccacccaggcaacccccagtgggcttggcactgaggggatgcccacagtagagcccggtctgcagaggcggcttctcaggaacctggtctcctacttgaaacagaagcaggccgcaggggtgatcagcttgccagtgggggggtccaagggcagagacggcacaggcatgctctacgccttcccaccctgcgacttttcccagcagtacctccagtcagcactaaggacattgggcaagctagaagaagaacacatggtgatagtcatcgtcagagacactgcctagcccaagcctgtctttcccagcgtcatgtttgtgtcacaaaagcagttattttaaaatctgatcccctctctaccctaccactttggtttgaattatctcctgggttattttggttcatttgggtggggatcaaagtcctgtccaccaccaaaactaagttcttagattttgggggatttttttttttaaacgatgagaagggaatccggttatgttgatttctagtgtacaagatactgtctgctgtggttctgtatttttttattttttgaccaactgtatggaaagttgtcagtaaaacctttgacagaggatggatttttaaacctgttcagagtcctggtttaatcaatcaagctaaaagaatcgaagacatccctagtgcatgtacacgaatgccctacgtcatccttccagcaccactgctgcatgggtcactctcggcctctcaattcttcaggctcagtctggactctacttacactcatttttatcttggctgacagcaggcaagcttcagtttgggctgtggacgctgccacacaagcctgagtagagcccatgcaaaggaagggatggggtgagcgcaaggcctgtggtcagcagctactgatggttttttctgccttaaaccgtgtgtgtgtccatcatcatcagtttgagctgtggctgtttgtttgggacagagtgcccactcagcatgtttggcagcaggtagccttcagcagctgtgtagtcttgtacaaggagaagctgtgcactgttgatgccagggggtctcggggcccctgatctgtccaggctcctggttcggcctactttctagcctcactcagcccagggatagccagtgttgggagacagagttgcctcaggttcccaggggcccgggagtccaaatactggaatggagggttggaggcagccttccttggatttactcatgaactttgcctagttgtttgtgatttttggctttctctggtcgttcaggggtgatgggtaatagagcaggcccgtgtccagtcatacctagagatttgtggggggatactgaacctctagactgaagtacttaccggggagcacagtggactaggggatgcccttgataatgacggtttcctaggtgcaagatcagagcatgtgcctacaccttgtgccctgatgccgaggtggagaccattgggaaataattaatagatatttttctggggggaaatcacaagtcactgaggtgtttgtttgtttgttaggcagtgctagagcttgaagccactcaagccagttggggaggaaagggatgcggaggtaccctctagctgggaagaagggtgagattccgtcttcttccctgtctcaagtaagtaaggaaggtactgcggacagtgcgggccagggaggaaaaccagagcacacagttttgtcaccatggaacaccccaaatgccattcttcagcgtgtctggtaccttggatgttcaaacagggaacactgtcagggctgaggagaacagaagctctggtaagcgaatgagcccctagatgataaccaggaactccaggttctgctggccgtggcatcctctctccaggtctgctcccttaccggagctaggataaggtagcatgagtgacacctgagattagaggctggggctcactgcaggctgtggagaggtcatgctggtccacaggaacacttggcagtgctctcgtagacccctcggtgatgtggaatggacaggtgcctcgcaagagagcaagcacgttcataacaaaacagcaacacaaagacatgttaagcatgtttatttatttgcctgtttttgtttttttacttgagctgtggtcacagctgccaggtacctaagcaagtcagttgggtacagcaggacacgccaccattccagggtagctggtaccgccagaaacaggagtgggtcttgtcctgttgcaggcacactgcagtggttttcctgcagctctccaacaaacgcctgagtcacaggccagagctgccttggtatgttgttaagtccaaaacttcttctctgggctacctatcttccttcatgaagcaggtgctcaggacccggaagaatcatctacctcccagctttgtgagacagaaccaagtaaaaggaaacatgctagaaaacgtgcctagagaagacacttcaacctttgccttatccaacccctcttcagagaaaggtgtcccatggccccaaaaagaactgccaagttttggtgaggagtaacaccctggcatgacattccttctctttcctggccctcaaccacttccttcctttggctcttaagacctagcaggttctgtgaactctcaggccttggccagcactagttaggggaggtcaggtggtcaatgtcctggtgattttatgagactgccccactgagaaaacttacttacttcaggcatccagtgcccccacccagggttcaggccctgtctaaggtgttgcttaaagacaaaaaggcaacatgtgcctcactggtggtgtgccactgttctcatgctgcctcctaagtgactccgattttcagccctggtagaataaggaagacagctgatgcctccttagccccttagcacatgttcctaaggtgtgttgtcaagccaacctgaattctgcctccctgttatagtccctgtctcccccacagagacctgtgggtgctcccagcagagttgagactggctccgttgagttaatgactagaatatagtgctttcactacttgattgttaacctgttttcttctgatgccatcagtaccagcagtcagactattccactggttaagtgtttactaccattaaagcgaggcatgaagcaaagagctgagtgagtcctctgctctccagaggaccaagaaatacctgtgtgacacagacccacttcagtgtgtacagcaaattctatagtgcttctgagcccagcagggctttacctgcccctggagagttttagccgtcttgtgtttcttgtttacttcacaaccaaatttgtcccctcttctctctgttaagggagagaagtcactttagctggataatacctatgtaacaaactgagcagctgttatttgggcaaaatcaaaggaagaaagagactatggtcttctatttattgtgggaaggaaaacagggtggggcgggtgagtgaaaaggtggaaatccctggtaccttgcctggtggttacacagtttaaccataggccaattttaggggcctctgaagtatctttctacaaacgcagacaagctccactacccctaacctgccaggatgctcaagtccactgtcacaatccctttcagaaaacattagtggccgctgccccagctacagagacggccgaaatgctttcactccttagctttgccaactccatcctccaaaacttcccagaatacctccctttccagttctaccaaatctgtacttgggagcagcctgctggatccagaacatgacaacagagagctgcgtccacagggaacaaagccctgacctctctctccacattacccttacaaaaacaggccctccccatgagagagctacacggcaggggcagacactgtgagtataagctactttcctccctggagtgctctatgtgggcagaacatgctctccttgcctctcctggaaggtgtcttctctatggcctggctagagctgcaaaaaagggacacaccccacttcggtaaaagaaaatagggaaaggccataaacaaagacagacttgtagtttattttgtattttttttaaataaatacactttacattaaagaaaaaaaaaaaaaaaa

SEQ ID NO: 123 - DNA, 2531 bp, Homo sapiens
gctcgctggtggcggacccggaggctgctgcggcgccggggctccgtggcctggattgaatccgatcgggagccatgagcgtggacaaagctgagctatgcgggtctctgctcacctggttacagacgttccacgttccgtctccctgtgccagccctcaggacctgagcagcggccttgccgtagcctatgtgctgaaccagatagacccctcctggttcaacgaggcatggctccagggcatctcggaagatccaggtcccaactggaagctgaaggtcagcaatctgaagatggtcttacggagcctagtagagtactcccaggatgtcctggcgcatcctgtgtcagaagagcatctcccagatgtgagcctcattggagagttctcagacccggcagagctcggcaagctgcttcagctggtgctgggctgtgccatcagttgcgagaaaaagcaggaccacatccagagaatcatgacgctggaagaatcggttcagcatgtggtgatggaagccatccaagagctcatgaccaaagacactcctgactccctgtcaccagagacgtatggcaactttgacagccagtcccgcaggtactatttcctaagtgaggaggctgaggagggggacgaattacagcagcgctgtctggatctggagcggcagctgatgctcctgtcagaggagaagcagagcctggcgcaagagaatgcagggctgcgggagcggatgggccggcctgaaggcgagggtaccccaggtctcactgccaagaagctgctgctgctgcaatcccagctggagcagttgcaggaggagaacttcaggctggagagtggcagggaggatgagcgcctgcgctgtgccgagctggagagggaggttgcggagctgcagcaccggaaccaggcgctgactagcctggcccaggaggcacaggccctgaaggatgagatggatgaactacggcagtcttcggagcgtgctgggcagctggaggccacgctgaccagttgccggcgccgcttgggcgagctgagggagctgcggcggcaggtgcggcagctggaggaacgcaacgccggccacgccgagcgcacgcgacaactggaggatgagctacgccgagcgggctccctgcgcgcccagctggaggcgcagcggcggcaggtgcaggaactgcagggccagctgcaggaggaggccatgaaggccgagaaatggctatttgaatgccgcaacctggaggaaaagtatgagtcggtgacaaaggagaaggagcggctgttggcggagcgggactccttgcgggaggccaatgaggagctgcgctgcgcccagctgcagccgcgggggttgacccaggccgatccctcactggatcccacctccacacccgtggataacttagccgcagagatcctgcctgcggagctcagggagacgctcctgcggcttcagctggagaacaagcggctgtgcaggcaggaggcggccgaccgggagcggcaggaggagctgcagcgccacctggaggatgccaaccgcgcgcgccacgggttggagacgcagcaccggctgaaccagcagcagctatccgagctgcgggcccaggtggaggacctgcagaaagccctgcaggagcaggggggcaagactgaagatgccatttccattttgctgaaaaggaagctggaggaacatttgcagaagcttcatgaggcagatctggagttgcagaggaagcgggagtacattgaggagctggagccacccactgacagcagcacagcccggcggatcgaggagctgcagcataacttgcagaagaaggacgcggacttgcgggccatggaggagcgataccgccgctacgtggacaaggcccgcatggtcatgcagaccatggaacccaagcagcggccagctgcgggggcacctccagaactccattccctgaggacacagctccgagaacgggatgtccgcatccgacacctggagatggactttgagaaaagccgaagtcagcgggagcaggaagaaaagctgctcatcagtgcctggtataatatgggcatggccttgcagcagcgagctggggaggagcgggcgcctgcccatgcccagtcattcctggcacagcagcggctggcaaccaattctcgccgtggacccttgggacgcctggcatctctgaaccttcgccccactgacaagcactgacagacctcacaatcaagccagcctgggctccacccaccctggcttcctccagctcacatggcgcccagcactgggcttcagccaggtgctcgagagctttgaggccatgatctctgctcttccctctcccagattggtggggagggagggcgggaggtagatataggcctgttctttttagcaatgtgattcttgttgttgattctctctctggagttcatgtgctgcctcaggagactctgattttatatttgagaaaaataaaggcgttcaatctgcaaaaaaaaaaaaaaaaaa

SEQ ID NO: 124 - DNA, 2733 bp, Homo sapiens
tcatggctgcgcgtgcagacgtgcgtcatcgccgcgcgccgcgccgagcgaatctcggagtcggtgggtgcagatggcggcggcagttgtggtggcggagggggacagcgactcccggcccggacaggagttgttagtggcctggaacaccgtgagcaccggcctggtgccgccggctgcgctggggctggtgtcttcccggaccagcggtgcagtcccgccaaaggaagaggagctccgggcggcggtggaggttctgaggggccacgggctacactcggtcctggaggagtggttcgtggaggtgctgcagaacgatctgcaggccaacatctcccctgagttctggaatgccatctcccaatgcgagaactctgcggatgagccccagtgccttttgctactccttgacgcttttggcctgctggagagccgcctggatccctacctgcgtagcctagagctgctggagaaatggactcgcctgggcttgctgatgggcactggtgctcaggggctgcgagaagaagtccacactatgttgcgcggagtcttgttctttagcacccccagaaccttccaagagatgatccagcgtctgtatgggtgcttcttgagagtctatatgcagagtaagaggaagggggaagggggcacagacccggaactggaaggggagctggacagccggtatgcccgtcgccggtactaccggctcctgcagagcccgctgtgtgcagggtgcagcagtgacaagcaacagtgctggtgtcgccaggctctggagcagttccatcagctcagccaggtcttacacaggctcagtctgctggagcgggtcagtgccgaggctgtgaccaccaccctgcaccaggtgacccgggagaggatggaggaccgttgccggggcgagtacgagcgctccttcctgcgtgagttccacaagtggatcgagcgggtggtcggctggctcggcaaggtgttcctgcaggacggccccgccaggcccgcatctcccgaggccggcaacaccctgcgccgctggcgctgccacgtgcaaaggttcttctaccgcatctacgccagcctgcgcatcgaggagctcttcagcatcgtccgagacttcccagactcccggccagccatcgaggacctcaagtactgcctggagaggacggaccagaggcagcagctgctcgtgtccctcaaggctgccctggagactcggctcctgcatccaggcgtcaacacgtgtgacatcatcaccctctatatctctgccatcaaggcgctgcgcgtgctggacccttccatggtcatcctggaggtggcctgtgagcctatccgccgctacctgaggacgcgggaggacacagtgcggcagattgtggctgggctgacgggggactcggacgggacaggggacctggctgttgagctgtccaagaccgacccggcgagcctggagacaggccaggacagtgaggatgactcaggcgagccagaggactgggtcccggaccctgtggatgccgatccagggaagtcgagctccaagcggcgttcatcggacatcatcagcctgctggtcagcatctacggcagcaaggacctcttcatcaatgagtaccgctcgctgctggccgaccgcctgctgcaccagttcagcttcagccccgagcgggagatccgcaacgtggagctgctgaagctgcgctttggcgaggccccaatgcacttctgtgaagtcatgctgaaggacatggcggactcccgccgcatcaatgccaacatccgggaggaggatgagaagcggccagcagaggagcagccaccgttcggggtctacgctgtcatcctgtccagtgagttctggccgcccttcaaggacgagaagctggaggtccccgaggatatcagggcagccctggaggcttactgcaagaagtatgagcagctcaaggccatgcggaccctcagttggaagcacaccctgggcctggtgaccatggacgtggagctggccgaccgcacgctgtctgtggcggtcaccccagtacaggcggtgatcttgctgtattttcaggaccaagccagctggaccctggaggaactgagcaaggcggtgaagatgcccgtggcgctgctgcggcggcggatgtccgtgtggctgcagcagggtgtgctgcgtgaggagccccccggcaccttctctgtcattgaggaggagcggcctcaggaccgggacaacatggtgctcattgacagtgacgacgagagcgactccggcatggcctcccaggccgaccagaaggaggaggagctgctgctcttctggacgtacatccaggccatgctgaccaacctggagagcctctcactggatcgtatctacaacatgctccgcatgtttgtggtgactgggcctgcactggccgagattgacctgcaggagctgcagggctacctgcagaagaaggtgcgggaccagcagctcgtctactcggccggcgtctaccgcctgcccaagaactgcagctgacacatcgcccgcccgcccgcccgcccgccaggcgctgccctgcaggtgctctcgtcctcccgtgccagcccccgcccgcccgtgtcccagaatgcactgctgaggagcatgcccacccccacccccgcagtgtgcagattaaagcaagtcagatcatcaaaaaaaaaaaaaaaaaaaaaaaaaaaaaaaaa

SEQ ID NO: 125 - DNA, 3178 bp, Homo sapiens
cacctctaacccaggctcagagtagctgctgtttctgagagaacgattcgtaggacagcccctgacgccattcccttttgcccttctttctgcgggcctttccggtacttgagcggtgtccagagcgtggccagttctcgtctatctggctgcctttagggagcggtgcctagcgttggccaatagttggctgtcgaaagtgccggcccccgcgccggcgcctgcagcagccgggtgggaaggctcaagatggcgtgcttgttggagaccccaatccgcatgagcgtcctttcggaccaggaatgaaagttactgggagataacttcgaaggattttgcaacaaattcgagctgtccgactctgagaatggaagtaacagctagcagtcgccactatgttgacaggctatttgaccctgatccccagaaagttctacaaggtgtcatagacatgaaaaatgctgtaattggaaacaacaagcagaaagccaatctcattgttttaggagctgttccaagattgttgtacttgcttcagcaagaaacctcaagcacagagctgaaaactgaatgtgcagtggtgttgggaagtcttgctatgggtactgaaaacaatgtcaagtctctactggactgccatattatccctgccttattgcaaggactactgtccccagacctgaagtttattgaagcttgcctccgatgcctgcgtaccatcttcaccagtcctgtcactccagaggagctactgtatacagatgccacagtgataccacacctcatggcactgcttagcaggtcccgctatacccaggagtacatctgtcagatcttctcacactgctgtaaagggccagatcatcaaacaattttatttaaccacggtgcagttcagaatattgctcacctactaacctcactgtcctacaaagttcgaatgcaagcactgaaatgtttctcagttttagcttttgaaaacccccaggtatcgatgaccctggtaaatgttttggttgatggagaattgttaccacagatttttgtgaagatgttacagagggataagcctattgagatgcagctcacatcagcaaaatgtttaacttacatgtgtagagctggagcaattcggacagatgataactgtattgtattaaagacattaccttgtttggttcgaatgtgcagtaaggagagattactagaggagagagttgaaggagctgagacacttgcctatctgattgaaccagatgttgagctacagagaatcgctagcataactgatcacctcattgccatgcttgctgattatttcaagtatcccagctcagtgagtgccatcactgatattaaaaggcttgatcatgatttaaaacatgctcacgaactccgccaggctgcattcaagctctatgcctctcttggagcaaatgatgaagacatccggaagaaggtgagtctgggagaggggcgtcccccagtcctgacagccagcaggcagggagtgacgtcaacctgaaagtcgtggtgaagagcactaacagtgactgtttgaatataataaagcagagtgactaaaggcataattgaagaatgaatgggacccggatttggggggttgtttgtttgtttttagaacatagagtggcatggccgtgctggaatgacaaataactggcgtgctttttttttgtgtcattaatatgaattattatgttgcacatttttgcatgtgttctgataaaaatcaattctagcactgtgaagcttcagacaccttgaaagtcctaacattagaattgtaaatgttatttatggaaataccttccaatgctattgagaaattcaaatctctattgtatattgttctttgatatgtggcttagttttatgttttgattttttttgctactgtgcaagtttaatgtgaataaaatctttgtggaatgatgattttatgtttagtgagtggtcatctgaattttccagctccccagaaaatgtatgcactggtatagcacccttatgttactaaagcctagtctaacactgaactcatgttcttgatgagaatacttctagatgaggagtatagtggtaagtaagctctgacttggctccttccacaaaccaaaaagctggaacttaccactcaaaaacatgtataacctaataaattctacacaaggctttcaagaccatcagagagcaaaaccacatgttctgtcttgaggagccatagcagaaagagcaaattagtcattatttactgaacatgatgatttactaaatctctccatctgcattagtattttaaggagcactgtgagagaaatcacaaagtattagagtttaccatgattcagagaagttcttcaggcctgtagaaagaggagtatggaacaaccttacatttgttgaaataacttgaaaaggaaccatttcttgaagaaactgaagtaatagcaataagatttgatgtgtgagtagctttgatttaaaatcaatgcaaaaagcacaactaataaattgaatgtttccatgtacctcactttatttcagttaacaagatactttgacttgaagtgtttttagtgtatccctatgaaaatcatttttggtacatctaagttttcacttataaactgttatttcaaagcaaacatactagtgatatatatatgatttatggatgttgacgccaatgttcagtttgggtacgttggtgtattgcaaggggagaggcttttataacaatagatttgaacatttttaaaaaattggactgtgtaacttaaatacacaattatttggtttaggatggttattagggcccattagaaacaggagaagtattttacccattcttaaagctctaaaaaaccatctcatggactgaaaggtagatagacagatggaccacaatgggaaataggatgtccatttgtacttctttgtacttttttgttaataaactgttttggaattaatggcttaatttgtgatatcatgttctagaaatacctgcaacatgacagtctaatcagtagtctattaaaacttgtattcataatgtgtataatttcctggtaaggctaactcctgatcgtttctgtagaaagatgacaaataaagaaaaagttataattattaattaaaaaaaaaaaaaaaa

SEQ ID NO: 126 - DNA, 1622 bp, Homo sapiens
tttccagtccagggccgctgagagtgggggtggctgggagcagcgcagcctccggaggaggaggcggaggccgaggaccaggaatcaccttcaagcctatgtcgtgaggctttggcagaaattaagaaggaaatatctccattgttcattggcatggaaaaatgttcagtgggaggattagagttgactgaacagactcctgctttattagggaatatggccatggcaactagtctcatggacataggggattcatttggtcatccagcttgtcctttagtcagtagatctaggaactcaccagtggaagatgatgatgatgatgatgatgttgtgtttattgaatctatacaacctccttcaatttctgctccagcaatagctgatcaaagaaacttcatatttgcatcatcaaaaaatgaaaagcctcaaggaaattattctgtaattcctccttcttcaagagatttggcatctcagaaaggaaatataagtgagacaattgttattgatgatgaagaggacatagaaacaaatggaggagcagagaaaaagtcttcctgttttatcgaatggggacttcctggaactaaaaacaaaaccaacgatttggatttctccacttccagtctttcaagaagtaaggtaaatgcaggaatgggtaatagtggtatcactacagaattgactctgaaatacattattactaatgttacaaccttagaaacaggtataagctctgtgaatgctgggcaagatgtgaacataattattacatataaaacatcactatagaataccaacttgggagatgtcgctaaaggacttcagtcaagtaattttggtgttaatatacaaacgtacaccccatctttaactccacagaccaagactggagtaagaccttttaaccctggtagaatgaatgtggcaggagacttatttcagaatggagaatttgcaactcatcatagtcctgattcttggatctcccagtcagcttcatttcccagtaatcagaaacagccaggggtggattctttatcaccagtggccttacttcgtaagcagaatttccagcctacagcccaacaacaacttactaaaccagctaaaatcacttgtgcaaattgcaaaaagcctttacagaagggacagacagcttatcaacgaaaaggatcagctcacctcttttgctctaccacctgcctttcttccttctctcataaacgtactcaaaacacacgaagcataatatgtaaaaaagatgcatctacaaagaaggctaatgtcattcttccagtagaatcaagcaaatccttccaagaattttatagtacatcttgtttgtctccctgtgaaaacaactggaatcttaaaaaaggagtttttaataagtcaagatgtacaatttgtagtaaattagcagaggtctggatttttatacctaagttgttgtttaggctaacagtgataattttaacttttaagtgctattatgtactctttcatctacataatgcacgtgttctggatgtataacatgaagctgaaaggaagaataaggatatgttagaactatcttatgggatattttataaataaaattccatttgcatagc

SEQ ID NO: 127 - DNA, 892 bp, Homo sapiens
cagcggcagtggtgctttcccgaatctcagaatgcctgttaaaagatcactgaagttggatggtctgttagaagaaaattcatttgatccttcaaaaatcacaaggaagaaaagtgttataacttattctccaacaactggaacttgtcaaatgagtctatttgcttctcccacaagttctgaagagcaaaagcacagaaatggactatcaaatgaaaagagaaaaaaattgaatcaccccagtttaactgaaagcaaagaatctacaacaaaagacaatgatgaattcatgatgttgctatcaaaagttgagaaattgtcagaagaaatcatggagataatgcaaaatttaagtagtatacaggctttggagggcagtagagagcttgaaaatctcattggaatctcctgtgcatcacatttcttaaaaagagaaatgcagaaaaccaaagaactaatgacaaaagtgaataaacaaaaactgtttgaaaagagtacaggacttcctcacaaagcatcacgtcatcttgacagctatgaattccttaaagccattttaaactgaggcattaagaagaaatgcactcaccatgagcaccaacttctgcatctgcctgatcatatttaaaggaacagagaaatatttgtaattaatctgcccagtaaataccagctcgtagcagttggcaggtgcatgtctagataaaatttcttgcagctaatttaaactttctacacgcaccagtagataatctcaatgtaaataatacatttcttcttggctctttaatgtaagccaacatggagaggaagatcttgacttatattctgtaccacatacacttctgtggacttttagcatttgtgggtagacttaatggccttcgtggcc

SEQ ID NO: 128 - DNA, 3512 bp, Homo sapiens
gacatggcgagtgtagtgctgccgagcggatcccagtgtgcggcggcagcggcggcggcggcgcctcccgggctccggctccggcttctgctgttgctcttctccgccgcggcactgatccccacaggtgatgggcagaatctgtttacgaaagacgtgacagtgatcgagggagaggttgcgaccatcagttgccaagtcaataagagtgacgactctgtgattcagctactgaatcccaacaggcagaccatttatttcagggacttcaggcctttgaaggacagcaggtttcagttgctgaatttttctagcagtgaactcaaagtatcattgacaaacgtctcaatttctgatgaaggaagatacttttgccagctctataccgatcccccacaggaaagttacaccaccatcacagtcctggtcccaccacgtaatctgatgatcgatatccagagagacactgcggtggaaggtgaggagattgaagtcaactgcactgctatggccagcaagccagccacgactatcaggtggttcaaagggaacacagagctaaaaggcaaatcggaggtggaagagtggtcagacatgtacactgtgaccagtcagctgatgctgaaggtgcacaaggaggacgatggggtcccagtgatctgccaggtggagcaccctgcggtcactggaaacctgcagacccagcggtatctagaagtacagtataagccacaagtgcacattcagatgacttatcctctacaaggcttaacccgggaaggggacgcgcttgagttaacatgtgaagccatcgggaagccccagcctgtgatggtaacttgggtgagagtcgatgatgaaatgcctcaacacgccgtactgtctgggcccaacctgttcatcaataacctaaacaaaacagataatggtacataccgctgtgaagcttcaaacatagtggggaaagctcactcggattatatgctgtatgtatacgatccccccacaactatccctcctcccacaacaaccaccaccaccaccaccaccaccaccaccaccatccttaccatcatcacagattcccgagcaggtgaagaaggctcgatcagggcagtggatcatgccgtgatcggtggcgtcgtggcggtggtggtgttcgccatgctgtgcttgctcatcattctggggcgctattttgccagacataaaggtacatacttcactcatgaagccaaaggagccgatgacgcagcagacgcagacacagctataatcaatgcagaaggaggacagaacaactccgaagaaaagaaagagtacttcatctagatcagcctttttgtttcaatgaggtgtccaactggccctatttagatgataaagagacagtgatattggaacttgcgagaaattcgtgtgtttttttatgaatgggtggaaaggtgtgagactgggaaggcttgggatttgctgtgtaaaaaaaaaaaaaaatgttctttggaaagtacactctgctgtttgacacctcttttttcgtttgtttgtttgtttaatttttatttcttcctaccaagtcaaacttggatacttggatttagtttcagtagattgcagaaaattctgtgccttgttttttgtttgtttgttgcgttcctttcttttccccctttgtgcacatttatttcctccctctaccccaatttcggattttttccaaaatctcccattttggaatttgcctgctgggattccttagactcttttccttcccttttctgttctagttttttacttttgtttatttttatggtaactgctttctgttccaaattcagtttcataaaaggagaaccagcacagcttaggatttcatagttcagaatttagtgtatccataatgcattcttctctgttgtcgtaaagatttgggtgaacaaacaatgaaaactctttgctgctgcccatgtttcaaatacttagagcagtgaagactagaaaattagactgtgattcagaaaatgttctgtttgctgtggaactacattactgtacagggttatctgcaagtgaggtgtgtcacaatgagattgaatttcactgtctttaattctgtatctgtagacggctcagtatagataccctacgctgtccagaaaggtttggggcagaaaggactcctcctttttccatgccctaaacagacctgacaggtgaggtctgttccttttatataagtggacaaattttgagttgccacaggaggggaagtagggaggggggaaatacagttctgctctggttgtttctgttccaaatgattccatccacctttcccaatcggccttacttctcactaatttgtaggaaaaagcaagttcgtctgttgtgcgaatgactgaatgggacagagttgattttttttttttttttcctttgtgcttagttaggaaggcagtaggatgtggcctgcatgtactgtatattacagatatttgtcatgctgggatttccaactcgaatctgtgtgaaactttcattccttcagatttggcttgacaaaggcaggaggtacaaaagaagggctggtattgttctcacactggtctgctgtcgctctcagttctcgataggtcagagcagaggtggaaaaacagcatgtacggattttcagttacttaatcaaaactcaaatgtgagtgtttttatctttttacctttcatacactagccttggcctctttcctcagccttaagaaccatctgccaaaaattactgatcctcgcatgatggcagccatagtgcatagctactaaaatcagtgaccttgaacatatcttagatggggagcctcgggaaaaggtagaggagtcacgttaccatttacatgttttaaagaaagaagtgtggggattttcactgaaacgtctaggaaatctagaagtagtcctgaaggacagaaactaaactcttaccatatgtttggtaagactccagactccagctaacagtccctatggaaagatggcatcaaaaaagatagatctatatatatatataaatatatattctattacattttcagtgagtaattttggattttgcaaggtgcatttttactattgttacattatgtggaaaacttatgctgatttatttaagggggaaaaagtgtcaactctttgttatttgaaaacatgtttatttttcttgtctttattttaacctttgatagaaccattgcaatatgggggccttttgggaacggactggtatgtaaaagaaaatccattatcgagcagcattttatttacccctcccctatccctaggcacttaaccaagacaaaaagccacaatgaacatccctttttcaatgaattttataatctgcagctctattccgagcccttagcacccattccgaccatagtataatcatatcaaagggtgagaatcatttagcatgttgttgaaaggttttttttcagttgttctttttagaaaaaaag

SEQ ID NO: 129 - DNA, 2785 bp, Homo sapiens
gatccgccaccatggctgaaggagagaatgaagtgagatgggatggactctgcagcagagattcaactactagggagacagcattggaaaacattaggcaaaccattttgaggaaaaccgagtatcttcgttcggtgaaagaaacacctcatcgtccatcagacgggctttcaaataccgagtcttcggatgggttgaataagctacttgctcatctgcttatgctttctaagaggtgtcccttcaaagatgtgagagagaaaagtgagtttattctgaagagcatccaggaacttggcattagaattcctcgaccactaggacagggaccaagcagattcatcccagaaaaggagatcctccaagtggggagtgaagacgcacagatgcatgctttatttgcagattcttttgctgctttgggccgtttggataacattacgttagtgatggttttccacccacaatatttagaaagtttcttaaaaactcagcactatctactgcaaatggatgggccgttacccctacattatcgtcactacattggaataatggctgcggcaagacatcagtgctcctacttagtgaacctgcatgtaaatgatttccttcatgttggtggggaccccaagtggctcaatggtttagagaatgctcctcaaaaactacagaatttaggagaacttaacaaagtgttagcccatagaccttggcttattaccaaagaacacattgagggacttttaaaagctgaagagcacagctggtcccttgcggaattggtacatgcagtagttttactcacacactatcattctcttgcctcattcacattcggctgtggaatcagtccagaaattcattgtgatggtggccacacattcagacctccttctgttagcaactactgcatctgtgacattacaaatggcaatcacagtgtggatgagatgccggtcaactcagcagaaaatgtttctgtaagtgattctttctttgaggttgaagccctcatggaaaagatgaggcagttacaggaatgtcgagatgaagaagaggcaagtcaggaagagatggcttcacgttttgaaatagaaaaaagagagagtatgtttgtcttctcttcagatgatgaagaagttacaccagcaagagctgtatctcgtcattttgaggatactagttatggctataaagatttctctagacatgggatgcatgttccaacatttcgtgtccaggactattgctgggaagatcatggttattctttggtaaatcgcctttatccagatgtgggacagttgattgatgaaaaatttcacattgcttacaatcttacttataatacaatggcaatgcacaaagatgttgatacctcaatgcttagacgggcaatttggaactatattcactgcatgtttggaataagatatgatgattatgactatggtgaaattaaccagctattggatcgtagctttaaagtttatatcaaaactgttgtttgcactcctgaaaaggttaccaaaagaatgtatgatagcttctggaggcagttcaagcactctgagaaggttcatgttaatctgcttcttatagaagctaggatgcaagcagaactcctttatgctctgagagccattacccgctatatgacctgatgcctttccttcattaaagatgattctggaatgatcagcagatatagtctacaagggggaaggtactaagccccaggaccaatggtagacaaaataattcagaaatccattgtgccatgattcctttagtttctgctatttttctgtggaaaaccactgctggcacaagcagtgactgtttggcagcttcaagtttagagctgtgaagacaggctgccattcacagtattttgctttttgacagtacaagatgctgtgtaactgttttaatacagcaaatagtaactctccaaatcctgttgcttttatgttaaataagataacaagaattggagcatgcaaagaatgggacttggataatgacttaagctttatatgtaaagaattttagaagatcttggtgctgctattcctgctggaggaatgaatagatggctgtttcagttaagctattagtaataaaagtgaacattgctactatctgagcctacatacataacttgtgtgatttcaaattaaacttgcattatgtgttaattttcttgcatctaaaaaagcatagaattcctactcacacagctcagcaacaaccattttgatggtaacagttaatttctttcattagttttttaaattcagggttctggatattaaattaaaatggcattcttaaagattttcttcaaaaagcaatcctaaatgaaagtgtgtaaattataagaagctggcgatcttttgatatgctgtttcacaggatcctgacactggagggcagctgtcttgtgcattacttgtgttcccagcaccaaagttgtgggacatgttgctgtagactgctgcgcagtcctgggtgcattcagtctctctgcctctgcctgcctcctggtccccactttaaaggctgtgcagctccttaaataataaagctggaaaatatttttagtcgggttatcaaatttgatttacaaaaacgctaactttgtttgaaatgcaaacaggtttgaaaatatgtattaagtactttgtattctggaagcgtgaattgcttttgaagtctgtcagtattactggtatttttaaataaagaagaatttttctccaaaaaaaaaaaaaaaaaa

SEQ ID NO: 130 - DNA, 1722 bp, Homo sapiens
gcggccggtcgaccggagtggctgccctgcgcggggacactcagagcccggtgggcgggaggaaggcggcatgccccagacggtgatcctcccgggccctgcgccctggggcttcaggctctcagggggcatagacttcaaccagcctttggtcatcaccaggattacaccaggaagcaaggcggcagctgccaacctgtgtcctggagatgtcatcctggctattgacggctttgggacagagtccatgactcatgctgatgcgcaggacaggattaaagcagcagctcaccagctgtgtctcaaaattgacaggggagaaactcacttatggtctccacaagtatctgaagatgggaaagcccatcctttcaaaatcaacttagaatcagaaccacaggacgggaactactttgaacacaagcataatattcggcccaaacctttcgtgatcccgggccgaagcagtggatgcagcactccctccgggattgactgtggcagtggacgcagcaccccttcttctgtcagtactgttagtaccatttgcccaggtgacttgaaagttgcggctaagctggcccctaacattcctttggaaatggaacttcctggtgtgaagattgtacatgctcagtttaatacacctatgcagttgtactcagatgacaatattatggaaacactccagggtcaggtttcaacagccctaggggaaacacctttgatgaacgagcccacagcctcggtgccccccgagtcggacgtgtaccggatgctccacgacaatcggaatgagcccacacagcctcgccagtcgggctccttcagagtgctccagggaatggtggacgatggctctgatgaccgtccggctggaacgcggagtgtgagagctccggtgacgaaagtccatggcggttcaggcggggcacagaggatgccgctctgtgacaaatgtgggagtggcatagttggtgctgtggtgaaggcgcgggataagtaccggcaccctgagtgcttcgtgtgtgccgactgcaacctcaacctcaagcaaaagggctacttcttcatagaaggggagctgtactgcgaaacccacgcaagagcccgcacaaagcccccagagggctatgacacggtcactctgtatcccaaagcttaagtctctgcaggcgtggcacgcacgcacgcacccacccacgcgcacttacacgagaagacattcatggctttgggcagaaggattgtgcagattgtcaactccaaatctaaagtcaaggctttagacctttatcctattgtttattgaggaaaaggaatgggaggcaaatgcctgctatgtgaaaaaaacatacacttagctatgttttgcaactctttttggggctagcaataatgatatttaaagcaataattttttgtatgtcatactccacaatttacatgtatattacagccatcaaacacataaacatcaagatatttgaaggactctaattgtctttccttgacaagttgattttgcaattgtggtaaatagcaaataacaatcttgtattctaacataatctgcagttgtctgtatgtgttttaactattacagtgcatgttagggagaaattccctgaatttctttagttttgtattcaaacaattatgccactcgatgcaacaaacataataaatacataaaggatttaaaaaaaaaaaaaaaaaaaa

SEQ ID NO: 131 - DNA, 2725 bp, Homo sapiens
gttacgcgcagccccgcccccgcggcctcgtcgctcctgctgaggcggtagccgcttttcgtcgactcttaccggttggctgggccagctgcgccgcggctcacagctgacgatgggggaccccagcaagcaggacatcttgaccatcttcaagcgcctccgctcggtgcccactaacaaggtgtgttttgattgtggtgccaaaaatcccagctgggcaagcataacctatggagtgttcctttgcattgattgctcagggtcccaccggtcacttggtgttcacttgagttttattcgatctacagagttggattccaactggtcatggtttcagttgcgatgcatgcaagtcggaggaaacgctagtgcatcttccttttttcatcaacatgggtgttccaccaatgacaccaatgccaagtacaacagtcgtgctgctcagctctatagggagaaaatcaaatcgctcgcctctcaagcaacacggaagcatggcactgatctgtggcttgatagttgtgtggttccacctttgtcccctccaccaaaggaggaagatttttttgcctctcacgtttctcctgaggtgagtgacacagcgtgggcatcagcaatagcagaaccatcttctttaacatcaaggcctgtggaaaccactttggaaaataatgaaggtggacaagagcaaggaccaagtgtggaaggtcttaatgtaccaacaaaggctactttagaggtatcctctatcataaaaaagaaaccaaatcaagctaaaaaaggccttggggccaaaaaaggaagtttgggagctcagaaactggcaaacacatgctttaatgaaattgaaaaacaagctcaagctgcggataaaatgaaggagcaggaagacctggccaaggtggtatctaaagaagaatcaattgtttcatcattacgattagcctataaggatcttgaaattcaaatgaagaaagacgaaaagatgaacattagtggcaaaaaaaatgttgactcagacagactcggcatgggatttggaaattgcagaagtgttatttcacattcagtgacttcagatatgcagaccatagagcaggaatcacccattatggcaaaaccaagaaaaaagtataatgatgacagtgacgattcatattttacttccagctcaaggtactttgacgagccagtggagttaaggagcagttctttctctagctgggatgacagttcagattcctattggaaaaaagagaccagcaaagatactgaaacagttctgaaaaccacaggctattcagacagacctactgctcgccgcaagccagattatgagccagttgaaaatacagatgaggcccagaagaagtttggcaatgtcaaggccatttcatcagatatgtattttggaagacaatcccaggctgattatgagaccagggcccgcctagagaggctgtcggcaagttcctccataagctcggctgatctgttcgaggagccgaggaagcagccagcagggaactacagcctgtccagtgtgctgcccaacgcccccgacatggcgcagttcaagcagggagtgagatcggttgctggaaaactctccgtctttgctaatggagtcgtgacttcaattcaggatcgctacggttcttaatactgaagtcatgatgtgtatttcctggagaaattcctctttaaatgaacaagtaaccacatctcaggcggcagtgaagtccagatagttttgcagattgttttgctactttttcatatggtatatgtttctgatttttaatatttcttttgagaaattctgagttctgatgtaggagctttcctgtgatttctgtttcacgttccttcctgtcacaccctcctttggcgtctctgtgtatatccttgctttattttcttggaacctttgatttcaacactgagggcctggagacctcggctcctcctgctcctgaaccaggaggcttcatgtgggggaggaggagaggtctccatgtgacacatgggctcagggctgccagaatcagcggatgctggatgggcctgcagaaacaacactcaccacacacacttccttcaaaagaccaaaagtgactggtgtctcgtgtgacagattgcttcatttatgtttctacatagtaaggtgactgccaaataatatttgaagtcatctgtctctttgtaaattattttatatgacctataaatttaaaaatgtttttcagtgagtgcttttaacaaacttaagcttctgccctgccaagggaattaatgttatcttgtgaaaggtgttgctgtttgaattgatgagaaatggaagatgagaactccctaagagttctcataataaatcatctcatcacaaatcaatacggtatacagagttaaagtggaatgaggtaagaagatacagctacagaaaatagttgcgtgtatgggagaacagtcattgtaattgggtagttttgttaataaatatttttaaatcttgcttttcagaaattaccgaatgtgtataaacaaataaagaaaaataatttagctgtgttttagacagcattagaatatattgttcagcacagtaaaatatatttgaaatttgataagccaaaaatgtggttttgaatgaatattttgtgaatctttcttaaaagctcaaatttgtagacttctaaatagaataaacacttgcagcagatgg

SEQ ID NO: 132 - DNA, 3952 bp, Homo sapiens
aggtttggggtcaaggagcaaactctgcacaagatggcggcggtagcggcagtggcggcgcgtaggaggcggtcttgggcgtctttggtactggcttttttaggggtctgcctggggattacccttgctgtggatagaagcaactttaagacctgtgaagagagttctttctgcaagcgacagagaagcatacggccaggcctctctccataccgagccttgctggactctctacagcttggtcctgattccctcacggtccatctgatccatgaggtcaccaaggtgttgctggtgctagagcttcaggggcttcaaaagaacatgactcggttcaggattgatgagctggagcctcggcgaccccgataccgtgtaccagatgttttggtggctgatccaccaatagcccggctttctgtctctggtcgtgatgagaacagtgtggagttaaccatggctgagggaccctacaagatcatcttgacagcacggccattccgccttgacctactagaggaccgaagtcttttgcttagtgtcaatgcccgaggactcttggagtttgagcatcagagggcccctagggtctctttctcggataaggttaatctcacgcttggtagcatatgggataagatcaagaaccttttctctaggcaaggatcaaaagacccagctgagggcgatggggcccagcctgaggaaacacccagggatggcgacaagccagaggagactcaggggaaggcagagaaagatgagccaggagcctgggaggagacattcaaaactcactctgacagcaagccgtatggccccatgtctgtgggtttggacttctctctgccaggcatggagcatgtctatgggatccctgagcatgcagacaacctgaggctgaaggtcactgagggtggggagccatatcgcctctacaatttggatgtgttccagtatgagctgtacaacccaatggccttgtatgggtctgtgcctgtgctcctggcacacaaccctcatcgcgacttgggcatcttctggctcaatgctgcagagacctgggttgatatatcttccaacactgccgggaagaccctgtttgggaagatgatggactacctgcagggctctggggagaccccacagacagatgttcgctggatgtcagagactggcatcattgacgtcttcctgctgctggggccctccatctctgatgttttccggcaatatgctagtctcacaggaacccaggcgttgcccccactcttctccctcggctaccaccagagccgttggaactaccgggacgaggctgatgtgctggaagtggatcagggctttgatgatcacaacctgccctgtgatgtcatctggctagacattgaacatgctgatggcaagcggtatttcacctgggaccccagtcgcttccctcagccccgcaccatgcttgagcgcttggcttctaagaggcggaagctggtggccatcgtagacccccacatcaaggtggactccggctaccgagttcacgaggagctgcggaacctggggctgtatgttaaaacccgggatggctctgactatgagggctggtgctggccaggctcagctggttaccctgacttcactaatcccacgatgagggcctggtgggctaacatgttcagctatgacaattatgagggctcagctcccaacctctttgtctggaatgacatgaacgaaccatctgtgttcaatggtcctgaggtcaccatgctcaaggatgcccagcattatgggggctgggagcaccgggatgtgcataacatctatggcctttatgtgcacatggcgactgctgatgggctgagacagcgctctgggggcatggaacgcccctttgtcctggccagggccttcttcgctggctcccagcgctttggagccgtgtggacaggggacaacactgccgagtgggaccatttgaagatctctattcctatgtgtctcagcttggggctggtgggactttccttctgtggggcggatgtgggtggcttcttcaaaaacccagagccagagctgcttgtgcgctggtaccagatgggtgcttaccagccattcttccgggcacatgcccacttggacactgggcgacgagagccatggctgttaccatctcagcacaatgatataatccgagatgccttgggccagcgatattctttgctgcccttctggtacaccctcttatatcaggcccatcgggaaggcattcctgtcatgaggtgcagtaccctcaggatgtgactaccttcaatatagatgatcagtacttgcttggggatgcgttgctggttcaccctgtatcagactctggagcccatggtgtccaggtctatctgcctggccaaggggaggtgtggtatgacattcaaagctaccagaagcatcatggtccccagaccctgtacctgcctgtaactctaagcagtatccctgtgttccagcgtggagggacaatcgtgcctcgatggatgcgagtgcggcggtcttcagaatgtatgaaggatgaccccatcactctctttgttgcacttagccctcagggtacagctcaaggagagctctttctggatgatgggcacacgttcaactatcagactcgccaagagttcctgctgcgtcgattctcattctctggcaacacccttgtctccagctcagcagaccctgaaggacactttgagacaccaatctggattgagcgggtggtgataataggggctggaaagccagcagctgtggtactccagacaaaaggatctccagaaagccgcctgtccttccagcatgaccctgagacctctgtgttggtcctgcgcaagcctggcatcaatgtggcatctgattggagtattcacctgcgataacccaagggatgttctgggttagggggagggaaggggagcattagtgctgagagatattctttcttctgccttggagttcggccctccccagacttcacttatgctagtctaagacccagattctgccaacatttgggcaggatgagagggctgaccctgggctccaaattcctcttgtgatctcctcacctctcccactccattgataccaactctttcccttcattcccccaacatcctgttgctctaactggagcacattcacttacgaacaccaggaaaccacagggcccttgtcgccccttctctttcccttatttaggagccctgaactcccccagagtctatccattcatgcctcttgtatgttgatgccacttcttggaagaagatgagggcaatgagttagggctccttttccccttccctcccaccagattgctctcccacctttcatttcttcctccaggctttactcccctttttatgccccaccgatacactgggaccaccccttaccccggacaggatgaatggatcaaaggagtgaggttgctaaagaacatccttttccctctcattctacccttttcctctccccgattccttgtagagctgctgcaattcttagaggggcagttctacctcctctgtccctcggcagaaagacgtttccacacctcttaggggatgcgcattaaacttcttttgcccccttcttgtcccctttgaggggcacttaagatggagaaatcagttgtggtttcagtgaatcatggtcacctgtatttattgctaggagaagcctgagggtggggggagatgatcatgtgtgctcggggttggctggaagccctgggtggggggttgggggaggactaatggggagtcggggaatatttgtgggtattttttttacttcctcttggttcccagctgtgacacgttttgatcaaaggagaaacaataaagggataacccataaaaaccataaataaaaaaaaaaaaaaaaaaaaaaaaaaaaaaaa

SEQ ID NO: 133 - DNA, 5086 bp, Homo sapiens
gcctgcgccgcgcagcccgcctcgggcgggaggcgggaggcgggaggccgggcccaggccggggcagcccctccaccgcaccgtcctgggccggtgcccaggtccgagtcgccttccgcctgccccccccgccaatcccccgccgcggcagccccagccaggtcccgccgccaggccggctcccgcccccgctccgcccccggagccgcagccccgcccgccatcgccgtcgccatgttgtggctcccgcagccggcgctggggacgcgcgcggccgagactctggcctgcagtcgccgccgccgccgccaggtggtgtttggactctagaccatgtgcctaggtagaagtttttcctttctccgcagctctgctcccctagcaacgctcgccacacccttgttttgagatcctctctaaggagcggagagtttaataggcaagaaggaagggagaagacagaaggaagacgctcccccgtacggagacagagggagggggggctccaaagccgaaagaggaggtccctacctgccacggataccagtcagcccttgccagcatccagccatgggggatatgaaaaccccagattttgatgaccttctggctgcctttgacatcccagaccccaccagccttgatgccaaggaggccatccagacacccagtgaggagaatgagagtcccctcaaacctccaggcatatgtatggatgaaagtgtgtccttgtctcactcaggatcagcccccgatgtgccggccgtgagtgtcattgtcaagaacaccagccgccaggagtcatttgaagcggagaaagaccacattactcccagtctcctacacaatggattccggggctcagatctgcctccagatccccacaactgtgggaaatttgattctacttttatgaatggagacagtgccaggagtttccctggcaaactggagcctcccaagtcagagccattacccaccttcaaccagttcagtccaatctccagcccagaacctgaggatcccatcaaagataacggatttgggataaagcccaaacactctgacagttatttcccaccccctcttgggtgcggggctgtgggaggcccagtcctggaggctctggctaagtttccggttccagagctgcatatgtttgatcatttttgtaagaaagaacccaagccagaacccctgcccttggggagccagcaggaacacgagcaaagtgggcagaacacagtggaacctcacaaggatccggatgccactcgattcttcggggaagctttggagttcaacagccatcctagcaacagtattggagagtccaaggggcttgcccgggagcttggtacctgctcatcagtcccccctaggcagcgtctaaagccagctcattccaagctgtcctcttgtgtggcagccttggtggccttgcaggccaaaagagtggctagtgtcactaaggaggatcagcctggccacacaaaggatctctcagggcccactaaagagagttctaaaggtagccccaaaatgcccaagtcaccaaagagtccccggagccctctggaggccactagaaaaagtatcaagccatcggacagccctcgtagcatctgcagtgacagcagcagcaaaggctcaccgtctgtggctgccagctccccaccagcaattcccaaagtgagaatcaaaaccattaagacatcatcaggggaaatcaaacggactgtcacaaggatcctgccagatcctgatgatccaagtaagtcccctgttgggtcacctctagggagcgccattgcagaggcccccagcgagatgccaggggatgaggtgcctgtggaagagcactttcctgaggcaggcacaaattcagggagcccccagggggccaggaaaggggacgagagcatgacaaaggccagtgactcgtcatctcccagctgcagttctgggccccgggtcccaaagggggctgccccaggctcacagacaggcaagaagcaacagagcacagcactgcaggcatccaccctggcccctgccaacctcctgcccaaagccgtgcacttggccaacctgaacctcgtcccccacagtgttgctgcatcagtgacagccaagtcttcagtgcaaagacggagccagccacagcttacacaaatgtcggtgcccctggtccaccaggtgaaaaaggctgccccactgattgtagaggtcttcaacaaggtccttcacagctccaaccccgtgcccctctatgcgccaaatctcagcccgcctgcggacagcaggatccacgtgccggccagtgggtactgctgcctggagtgtggagacgcatttgccttagagaagagcctgagccagcactatggccggcggagcgtccacattgaggtactgtgcacactgtgctccaagacgctgctcttcttcaacaagtgcagcctgctccggcacgcccgtgaccacaagagcaaggggctcgtcatgcagtgttcccagctgctggtgaagcctatctctgcggaccaaatgttcgtgtcggcccctgtgaactccacggcaccagcagccccagccccttcatcctctcccaaacatggcctcacttcgggcagtgccagtccccctcctccagccttgccactctacccagaccctgtgaggctcatccggtactcaatcaagtgtcttgaatgtcacaagcagatgcgggactacatggtcctggctgcacatttccagaggacaacagaggagacagaggggctgacctgccaggtatgccagatgctgctgcccaaccagtgcagtttctgtgcccaccagcggattcatgcacacaagtccccctactgctgcccggagtgtggggtcctctgccgctctgcctacttccagacccatgtaaaggagaattgcctgcactatgcccgcaaggtgggctacaggtgcatccactgtggtgtcgtccacctgaccttggccttgctgaaaagccacatccaggagcgacactgccaggttttccacaaatgtgcattctgccccatggccttcaagactgccagcagcactgcagaccacagtgccacccagcaccccacccagccccacagaccctcccagctcatttataagtgctcctgtgaaatggtcttcaacaagaagaggcacattcagcagcatttttaccagaatgtcagcaagacgcaggtgggcgtcttcaagtgccctgagtgcccactcttgttcgtgcagaagccggagttgatgcaacacgtcaagagcacccacggtgttccccgaaatgtggacgagctgtcaaacctccagtcttcagcggacacatcctcaagccgccctggctctcgagttcccactgagccaccagccactagtgtggctgctcggagcagctccctgccttctggccgctggggtaggcctgaagcccaccgcagggtggaagccaggccgcggctgaggaacactggctggacctgccaggagtgccaggagtgggttccagatcgggagagctacgtgtcccacatgaaaaagagccacggtcggacattgaagcggtacccatgccggcagtgtgaacagtccttccacacccccaacagcctgcgcaaacacatccgcaacaaccatgacacagtaaagaagttctacacctgcgggtactgcacagaggacagccccagctttcctcggccctcccttctggagagccacatcagccttatgcatggcatcagaaaccctgatttgagccagacgtccaaagtgaaacctccgggtggacattcccctcaggtgaaccatctgaaaagaccagtcagtggagtgggggacgctccaggcaccagcaatggcgcaactgtctcttccaccaaaaggcacaagtccctttttcagtgcgcgaaatgtagttttgccacagactcggggctcgagtttcagagccacatacctcagcaccaggtggacagctccacagcccaatgtctcctctgtggtttgtgctacacctctgccagctccctcagccgccacctcttcattgtccacaaggtgagagaccaggaggaggaggaggaagaggaggcggcggcagcggagatggcagtggaggtggcagagccagaggagggctccggggaggaggtgcccatggagactagagagaatggactggaagaatgtgccggtgagcctttgtcagctgacccagaggcgaggagattgctgggcccggcccctgaggacgatggtggccacaatgatcacagtcaaccacaggcctctcaggaccaggacagccacacactgtcccctcaggtgtgaccggagactttgcagtgtgcatggtcaggggtggtgccgaagtgtcttccacctgccctgcggaccgtggaaaataaaaggctctgcccccagtgtgagtgtgaccggttgtaccctggagtagtgtctgccctgagctgccagtgctgggtatcccccagccccaggaaatgtggggtcggccaggaccctcacagctctgaatttgcttctgttatttatggcttttcgctgcttcttggtgccccatctcttgtctgtgtccttccaaccccaagctgcttatgtggcccaaccccactgctgtcaactaggcttgaaccccacagcggctgtgctcttctgggaggttcccgcttgctgccttcagccagggcgctcctcagagctctattttcctgcagacaccagctctccttcctgcctttagatcctgagaaggagggaaatgaggggtgctgacacagtccctctgggagagctctgcctagtctggtttggcgagggcccttgatcaccttgcccctcctccctgtcttctctgattcttttccctcaaaatagtcctgagaactaattgtcacagacattggaatatttgtactgctctcgtgccatttgagaggctgctgccccaggcaggccagcccctactcctcttggctacactcatgttgctcagactatatttcaaataaaaaatcttctcacc

SEQ ID NO: 134 - DNA, 5960 bp, Homo sapiens
ggccgggccgggggtgggccggagccgctgtggcggcggcggcggctgggggcggtgagcgcggcgtggggctgcccctccccggaggcggcgggggcggccggggccgcgccgcaccgcaccgcgcgggcggccatggagcgagcctagggcccgacaggaactgtggaaggtgcatcagtgaagaaatggaccaatgtgtataatcatggaatctccttgctaaccatcaccaccagctctccttaatacatgagcaagagtgggtcaggggagaaggaaaagaggtcaacatgaagctaaagcagcgagtcgtgctgttagcaattctccttgtcatttttatcttcaccaaagttttcctgattgacaacttagatacatcagctgccaaccgggaggaccagagggcctttcaccgaatgatgactggcttgcgggtggagctggcacccaagctggaccataccttgcagtctccctgggagattgcagcccagtgggtggttccccgggaagtgtaccctgaagagacaccagagctgggggcagtcatgcatgccatggccaccaagaaaatcattaaagctgatgtgggttataaagggacacagctgaaagccttactgatacttgaaggaggccagaaagttgttttcaaacctaagcggtatagccgagaccatgtggtggaaggggaaccgtatgctggttatgatagacacaatgcagaggtagcagcctttcacttggacaggattctgggtttccaccgagcccccttggtagttggcagatttgttaatcttcggacagagatcaaacctgtcgccacagagcagctgttgagcaccttcctaactgtaggaaacaatacttgtttttatgggaagtgctattactgccgagaaacagaaccagcttgtgctgatggagacataatggagggatctgtcacactttggcttccagatgtgtggcctctgcagaagcaccgtcacccatggggcaggacttaccgagaaggcaaattggccaggtgggagtatgatgagagctactgtgatgctgtgaagaaaacgtccccttatgactctggcccgcgcctcttggacatcattgacacagctgtctttgattacctgattggcaatgctgaccgccatcactatgagagctttcaagatgatgaaggcgctagtatgctcatccttcttgataatgccaaaagctttgggaacccctcgctggatgaaagaagcattcttgcccctctctatcagtgttgcattattcgggtgtccacctggaacagactgaactacctaaagaatggtgtgctaaagtctgccttaaaatctgccatggcccatgaccccatctccccagtgctctctgatcctcatctggacgccgtggaccagcggctcctgagtgtcctggccaccgtgaagcagtgcaccgaccagtttgggatggacacagtactggtggaagacaggatgcctctctcacacttgtaattttcgacacaaaataagtgaaacttctttttacaaagatagagaaacagcacaatcaattccaaatggtatgagatggattggaagtggccagcagcaagttctggtgacgggacagagtggccttggatgtctttggtattttctgtagtagaaactaaagcaaagaccacaagtttcagagcatggagacattcctgctgaatcgccttctcacctcctcggcaattgctcattctagggttgggcatcatagttggtcagtcttaattcccatgccaaaggacaaacaggtgtgacatttggatagatgaatactgggattggctctggagcatgtgttttgagttgaaccttgcagtcctttctctacgcccgtggattttgtggaaacactttgcaatctctttgtcttttttttttttaccagaactagttacattggaatgcttactgtcctacagagtggcagcaaataaaaccttgcattccatcaagccaaaatagcacactctgttagaggagatacatgtttaagatagaattggagggaaggacaaaaacagaaaaatgtttgggcttttaagccattgggtagtattgttttgatgatcttagaggagggaagaagagagagagacccaatggtagaaccagaatcagggagatgactgaactactgaaaaacaggttcccttgtatttaggatcttaaggtgtataaaaagcaaacatgactttgcacctaagtaaattctgcattctcatagttgtgtcccaattaaccaaaaagttgtctctagagaaaatactattacaatctaagcatgattctctgtggagactaattttttccccttttgccaaaagcagtccttcccaaattaacaaagcaaactgaaataataccttgaataacaggttgcctgtggtctctgtcatcctcgtttctcttctgaaatgaatttccacctctgcctttaaggcatttttgtcactgaagctgctgttcccaagagatcggcaacctttttgtccctttctcataagaaagggacactcctacaggtgagagtgtataccttactctctcagataagtggctggacttatcttgtgatttggggccatggaagattggaaacaaagattttaagccttcttctttttttcttttttcttttttttttgagaccaagtctcactctgttgcccaggctggagtgcagtggcacgatcttggcttactgcaacctccgtctcccgggttcaagcgattctcttgcctcagcctccagagtagctgggattacaggcgcccgccatcgtgcccagctaatttttatatttttagtggagacagggtttcgggtttcaccatgttggccaggttgatcttggactcctgaccccaggtgatccgcctgcctcagccttccaaagtgctgggattacaggcatgagccaccgtggccggccaagattttaagccttctgagccttgaaattgaggaggttaaaaggaagagccttaagattttgatttatgtcaaatcctaattctatcattcagtcttgtttggagttctgaacccatgatgttgtattatgcttctttctcctcttagcactctcaaatttcaggtttgtaaaacacagtttttgttttgtgttctggcaaagtgatctcaacatgtaagtagttgcagtaaaacacaggggcaaaggaagacaggcctgatgtgcccactcatctatggactcagagctgtgtgctttgctcctgcatcttgttgaggtgctgttccagctttgcatttctgtcaagtagaggcgaatatataaacagtgtggttgaatacatttaatgccagccattggaaactagttttaggcaaccactctcaaaaacagctttagaatttatgcccagttttcttgcattgaaagataactgagtaataacctgtaactatttttaaatggcatgaaattaggaaacttttgtacattttatatacattttgagatgaacagaacaatgggctgagttataaaaagcgtgtattgaatttaagaagacagactagcacaaaacacagaattcgtgttaaccaaaggaggcattgatttcagttttaaggctactcagtgttgtgtgtccagggaaattcacagctcagtatgagaataccttggttagtgctcacccacaagcttccaggagccagctgggaggagacaataggaagagatgtcatctctgctctccctgtaaatgttagttgaactaagttatggatttgtggtctttcaaatacatgacgcctttagtatgccacactgaaatgaataagaagtcttctgaaactgggaacttcataacattgaaggcagaagattctgctaaggaaaaaagcaggcaggaaagaaaatgtctcatcctttcttgaaagcatttgcagaaaatatatcatttcattttattcccatctgttttcaaactcgtgatcttaaaaggcattctgatgataaatttagaattttcatctataaaatttagaactctaatccataaagttagaattgagctaatagagtggtatgacatggcactaaaaatataaatttttgttgtaagtcaggattggagtaagctggaaaagtatgtttaggcaaatcttggagaaaaccaaccataaacttacagctctaaaattcagaaagccctaaaatttcaaacactgtttgaaagaagaggtgggggccgggtgccgtggctcatgcctgtcatcccagcatttgggaggctgaggcaggcggatcgcctggggccaggagttcgagaccagcctggctggctagcatggtgagaccgtctctactaaaaatgcaaaaattgacagggcacggtggcgtgcgcctgtggtcccagctgctcgggaggctgaggcaggagagtcgcttgaatccgggaggcgaaggttgcagtgagctgagattgtgctgctgcactccagcctgggagacagagcgagactctgtcttaaaaaaaaaaaaaggaggtgaatttttttttaagttttgtaacactgtcctactttatttattagaatctaaggctgttacaatcaagtcgttgcagggtttggatcagctgtaagttaggtatgcctaccaaacatccaaaggtagacgtggagacattttaatactacaaaactaggaaaatcagaactcatggccatttcctgccctcctccaacttgttaaaacatgtttattctaaagttcgaatggataaatttgagtataaaggttttgttataaaactgttctttagtgtaaggctgcattgtgggtttgggggaaatgtaaataattttctgtgtaaaacaaattcataggatctgatttgctcagagtattattcaagaatgtattaataaggcattgccccctgtttgcactcagggttaatatgtcaaatgaaatttaagaaggaaatggaagaattcaggtacattaattgcatattattttgggaaagatgagtcctatacgtggcaatttttcaatgtcatctgaagccagcattatcttccaaagaaatcgatcttttttttctaaaaaaaaaaaaatgcttttgccttcccttcccttcccatccgccatatttcttcagcctttcttctcgatcacccgtgtattctttgaccagtaaatgaccacacctcaatgatggtaaaacagcatcatcagtaagctatcttatatgcctcatcctgtgagtttgagcttcaggaaacatgagtaaaagtatatgtaatgtatatagtcgtatatgtattctagcaagaaaaacatatttattttgacaaaggggaacactgactttctgaaggattcagaaagaaccttagtgaaaggttctcagtctctgagagtggaccctaattaacataaagaccattcatcagcgaataactactgagcaactctagtgtgccagcacaggccagacatactagtgagccaggcacatctggccttgggaaactcatcctacaggggaaggccagtttttttcccttcaattcctcaagtctgggtggtgacaaggtaggggctaggtactggactaccacaggtttttaggaactaaggtgtttctcataaacacaaaatgttgggtgaaactgggaacaactactcagaagctcatttatttgcttaaatggaaagtgtgggagccactaccctctcttttgatctgccaaggatttcctctcagagctgttgcacagacagagattgtacttggtaagataccaaacaagacagatatggatctaaatttctaatgtgttctatgggtttcaattctgaaaaaagaaaatgaataaagattttaataaataaaaaaaaaaaaaaaaaa

SEQ ID NO: 135 - DNA, 6470 bp, Homo sapiens
cgcagaaccgaggtcgccgagtgatgatgttgtgaagtcgcccgcctgtccctgccacgcccgggcggttgctggcagtgggagcagcggcagcagcttcggctgctgctttcaggctgccgctgcattaggggcttcctgaggaaacgcgggcggacgacagaggatgccgaaccactccagtcatgactgtccaaagtatgataatcacatgagagtgctcgttgctacggatgtcatttgactcatcagagaaaatctgtctaaaagaaaatatccatgtgaccaaatccatttcattattgaatggcttgatggatttcctttactctgattcataccaaagctgtccttctcaaccaaagcaagaaaggatcctgcatgagtcaatcccagaatgcaatttttacatcaccaacaggtgaagaaaacctcatgaatagcaatcacagagactcggagagcatcactgatgtctgctccaatgaggatctccctgaagttgagctggtgagtctgctagaagaacaactaccacagtataggctaaaagtagacactctctttctatatgaaaatcaagactggactcagtctccacaccagcggcagcatgcatctgatgctctctctccagtccttgctgaagagactttccgttacatgattctaggcacagacagggtggagcagatgaccaaaacttacaatgacatcgacatggttacacatctcctggcagagagggatcgtgatctggaactcgctgctcgaattggacaagctctcttaaagcggaaccatatcttatctgagcagaacgaatccctggaggagcaattgggacaagcctttgatcaagttaatcagctgcagcatgagctatgcaagaaagatgagttacttcgaatcgtctccattgcttctgaagaaagtgaaactgattccagctgttctacacctcttcggttcaatgagtcctttagcttatctcaagggttgctgcagttggaaatgctgcaagaaaagctcaaggaactggaagaagagaatatggctcttcgatccaaggcttgtcacataaagacagaaactgttacctatgaagaaaaggaacaacagcttgtcagcgactgtgttaaagaacttcgtgaaacaaatgctcagatgtccagaatgactgaagaattgtcagggaagagtgatgagctgattcgataccaagaagagctttcctctcttttgtcacagattgtagaccttcagcataaacttaaagaacatgtgattgagaaggaagaactaaaacttcacctgcaagcttccaaagatgcccaacggcaactgacaatggagctgcacgagttacaagacaggaatatggagtgtctaggaatgttacatgaatcccaagaagaaataaaggaacttcgtagtagatctggccctactgctcatctctacttctcccaatcatatggagcttttactggggaatctttggcagctgagattgaggggactatgcgtaaaaagctgagtttggatgaggaatcttctctctttaaacaaaaagcccaacagaagcgggtatttgataccgtcaggattgccaatgacacacggggccgctctatctcattcccagctctgttacccattccaggctccaaccgttcaagtgtcatcatgacagcaaaaccttttgagtctggtcttcagcaaacagaggacaaatcactcctgaaccaggggagcagctcagaggaggttgcagggagctcccagaagatgggccaaccaggaccctcaggagatagtgatttggctacagcactgcatcgccttagcttgcgtcgacaaaactatttaagtgagaagcagttctttgctgaagaatggcagcggaagatccaggttctggcagaccagaaggaaggagttagtggctgtgtcaccccgacagagagccttgcctctctctgcaccacccagtcagagatcacagacctcagcagtgccagttgccttcgaggttttatgccagaaaaattacaaattgtcaagccccttgaaggatcacaaactctgtatcactggcagcagcttgctcaaccaaacttgggaaccatccttgatccacgaccaggtgtcattactaaaggctttacccagttgcccggggatgctatttatcacatctcagatttagaagaggatgaagaggagggtattacttttcaggttcagcaacctcttgaagtggaagagaaactttcaacatccaagccagtaacagggatcttcctgccacccattacttcagcaggtggaccagttacagttgcaaccgccaacccaggaaagtgcctgtcgtgcacaaactcaacattcactttcaccacctgtagaatattacatccctctgacatcactcaggttacccccagctctgggttcccttcattatcctgtggaagtagcggtagcagttcatccaacacggctgtgaattctcctgccttgtcctatagactcagcattggtgagtccatcaccaaccgacgagattccactacaaccttcagtagcaccatgagcttggccaaacttctacaagagcgaggcatctctgccaaagtgtaccacagcccaatttcagagaaccccctccagcctctccctaaatccctggctatcccttccacaccaccaaattcaccatctcactcaccttgcccttctcctttaccctttgagcctcgagtgcatctctctgaaaattttttggcctctcgaccagctgagacattcctccaggagatgtatggcttgagaccctcccggaaccctcctgatgttggccagttgaagatgaacttagtggacaggctgaagagactggggatagccagagtggtcaagaaccctggtgcccaagagaatggaagatgccaggaggcagaaattggtcctcaaaaaccagattctgctgtttatttaaattcaggtagcagtttattaggtggactaaggaggaatcagagtcttccagtcataatgggtagctttgctgccccagtttgcacatcctcacccaaaatgggtgtcctgaaggaggactgaggttcagcagttaactgaccttttatacaagttagcacatgaaggatagatatgcactgaaacatgtggtctggtctgacttgagagaaaaggaatgttgcacaagggttgtgaatgtgaaagggggaatggaggaatggaaataaaattgggatgagccctaatggaggaagtcgggcaaattgaaagtataaatgaatgggccatgagtgttcagagggagaaaagaaaggtttaatatactccttcagttgagttttcttgtcttgaacataaaaagtgaatacaaataaattcagtaatactaaaacatacagagatactgaacttgctggcacatttacttctggtaagcataaagcagagagaacccaggttagaaggatgggaagagaaaaggagcagttttattgcttatagaaagccgttctgaggggttggtggggtaagctcagtctattactgagacaatagtgagatggcttatatgtttcccctgttaatatctggttaaattatgtatccatcaaatggtatgctcgcagcattagcaaaattaggagtttcatctttttcattgaatcacaggtggagactcctattttcctttctgttttcaggcctttgagcccctgggagcccaaataccactcaattattttgtatttatgattaataaaagttcattttttaaatttgtatttttatacaacctccaaaaaaaaaaacaactgggtagagggtgggagggatttacttttaagaggcaaaatgtgagtaaattgaaaccaagaaaacttgtttttagaatatttcgtctgaataagtacagtagccaaggaatacaaacctaattgcatgtttttaaaaattccttggaggctggaaggggttaagccagaagtgcaatcaataggaattagggaatgttgtatatttatatatgtaaactttttttgtaagaaaagttggtgacaactaaaccaactttttccaaagtgcgctatgcatatttttaatgaaagatgacatgtatttgcacaaaaattctcaggcacattaaattattgtaaactgaagtaaaacccgggtgcttgctttgagattgtggttttttcttcctaatgtaaaataaaataaaacacatctgccttcttgatatttatagaattagagaataaactttttaatgggggagtcaaagctttttctttttctctaaggttcttttttttattcaaactgtatgaaatggcaaagtgaggctctggggttagatttcagcattcagcagttgacacaggctaagaaatggaaagaagtagatctgttttttctcaatgttgctgagcaaagtctgcttctcatcagatgacgtggctttgtctagacagcacgcagttcagaaagaaatgtctttatacaaaagacatgatagagaaaagatgagagaggggactaattattttgtttatgaaaatggcaagtaaattacttgatctttttggtgcttaatttgcaaatgttttgttcctttgtcctgacttaaaggcagttttctgaagaactcttgactcttgctcctatggttcccataggcacacctattcccaggccaaggagagtccttcctctccccttttgaggcatccccgccatccccccacttagagctatgtgctcaaaaagccaacatgaatgcagtggtaaaaatttgttagtttcttatactttttagaatctctcaataaaatttttctaaataaattccacaaaaacaaagggtgaagatggtctctccctttcgttccccttcactcagttgtgctgaggtcaatagagtgtagagtttcagaaaggattccagcaggtttatatgtgaatataagtgtccctgaatggggcaggcattaaatagaagaatccctgctgtttaaatttcccgcatattccaattcacttttaaaaaataccatttgaatttgtatttcataaagtgactctggggtgcttactttagtcaattcttaaaattttttatttgttccctaagaaagtaattactgtttctgttgcctggacagttacagtttccaggaaacatcaggaagtaggaaactgtagggccagagagtagtacaacgttaaattgtccgatttatgtgtattacttaaagctataaattgaactagatcttgccgtgctctgtattgagtataatttgtatacttttttataattaatgactaaatgatcactttggaggcagggtggtgggggtgtattagcagccaaataagcatatctgatcaaaaagaaccaggcttagattttttttaagtacattgatgttgatgttccaccagaaacaccttaagtgtatactgttgtgtaatgtctctagaaaggaatcctgtcttaaaactgggttttgctgttttttgaagtttctacctaaaatcatttttggtatatcctgataatctctataatactagaattgtctgcaaaatatagtaagaagaattggagcctaatagctgattcctcccaatttatctgttatgttttgtcactattcacattttagtcttttctacgataaaaattgtatgtgtactttcatgccagtataggaaacctcaatcttttttttttttcgcctttaagaaggttttcagtgattatacctcaggtatttctgagtgtcctattgtctaataggagaaatatcttcccgagctcagaattaaaagttctcctaaattatgaagatcccaaatcttatgtaaataaccttaggcatgagtccttagggagaagttaatgaccattgttaaagtgcttttttagaaaatgttgtgctgtatgttcttgatttgacataaatgaatagactttggcaagggaggaaataagttaaaaggcagcttacaagagcctattccctataaagggtataattttacacagtactcaaagcttgttatcttttctgaccattttagtacagaattagtacttggtggttactaacatcaacttgtgacatctagaactagggctcttagtgtttagtgggccacttctctgatgtcagatgcatgcagacctgtactccacatgcaacccaacagcagtgcagtgtgataactgagcggtcgcatggcagaggacatccccctcagagtgggcacaagtgccctctagggcagccaggggaatactattgttcgatacctgggatttgactttgtcaaacagctctttgtgcccctatctttgttttgtcaaatgtagatcagttaataaacatgagtagcttgaattttcaaaaaaaaaa

SEQ ID NO: 136 - DNA, 1272 bp, Homo sapiens
cccgccgccaggccaccgctgctgcggcagccatggcggaagttcatagacgtcagcatgctcgggttaaaggagaagcccccgcgaaatcctccacactccgagatgaggaggagctggggatggcgtcggccgaaacgctgaccgtgtttctgaagctgctggccgccggcttttacggcgtgagctccttcctgatcgtggtggtgaataagagcgtgctcaccaattacagatttccctcctcactatgtgttggacttggccagatggtggccacagtggcagttctctgggtgggaaaggcgctcagagtagtcaagtttcctgaccttgacagaaatgtacctcgaaagacgtttccactacctctactatattttgggaaccaaatcacgggactgttcagcacaaagaaactgaacttgccaatgtttacagttctgagaaggttctccatcctgtttacaatgtttgctgaaggagttttactcaagaagactttttcttggggtattaaaatgactgtatttgcaatgattattggagcctttgtagctgccagctctgacttggcatttgatctggaaggatatgcttttattctgataaacgatgtcctaacagcagcaaatggtgcatacgtaaaacaaaaattagattcaaaagagctgggaaaatatggactgctctattacaatgcactgttcatgattctgcccaccctggccattgcgtatttcacaggagatgcacaaaaggctgtggagtttgaaggctgggctgacaccctctttcttctgcagttcaccctctcctgtgtgatggggtttatcttaatgtacgccacagtactctgcacgcagtataattctgctcttacaactacaatagttggctgtattaagaatatattaataacttatattggaatggtctttggtggagattatattttcacgtggacaaacttcattggtttaaatatcagcattgctgggagcctggtatattcctatatcactttcactgaagagcagctgagcaaacagtcagaggctaataacaagctggacattaaggggaaaggagcagtgtgaccagaggattgcttcatctgatacgtaggcctaagtttttaatcaactcagaacactggcagttcctacagagacactgaggtgtcttgattatggaggaaataaccattcctttgcacttgtacaatctgaggattgattgctgccttttaaaattttatgaagagagaaa

SEQ ID NO: 137 - DNA, 5111 bp, Homo sapiens
ctgcggtccagtctagggggtctcagattggcggggatgggcagcagcggcaggtggccttggcttttgctgcagccgtcaacgacctatcatcggggtcctgcgtaaggtccggctggctgggacttggctgtgggtgggatggactggctgccggaccgagtgccctgcagttggtaggagtatgaggcagagtgatgcacacccgggcgcccagcatcgttctaattgccggagacattgcctcagactgtgcgctgctagaggctgcgttcctgagcaggaagcccgtttcctgggattggaactacccttcttggccagcgggaagtccccaaggacggagtcgaaaggtcaaatcttatctgtcagtgctgtgtgacagcatcgcaacgggatctgcagaacctgaactcgatccgtaatgcctcctgcctgcctctttcaagatggaggtgaaacctgtgggagaacctactcaagaggtgtctaaattcaaactttccaccaaggtagaaagcacgggacactggctggtggaagatcatgttcgaatatgggaagttttaaagacagaggagagctcgattcaggactggggtgaagaggtagaggaaggagctgtttaccatgtcaccctcaaaagagtccagattcaacaggctgccaataaaggagcaagatggctaggggttgaaggggaccagctgcctccaggacacacagtcagtcaatatgaaacctgtaagatcaggaccataaaagctggcaccttggagaagcttgtggagaacctgctgacagcttttggggacaatgactttacctatatcagcatctttctttcaacgtacagaggctttgcctccactaaagaagtgctggaactactgctggacaggtatggaaacctgacaagcccaaactgtgaagaagatggaagccaaagttcatcagagtccaaaatggtgatcaggaatgcaatcgcttccatactaagggcctggcttgaccagtgtgcagaagacttccgagagccccctcacttcccttgcttacagaaactgctggattatctcacacggatgatgccgggctctgacccagaaagaagagcacaaaatcttcttgagcagtttcagaagcaagaagtggaaactgacaatgggcttcccaacacgatctccttcagcctggaagaggaagaggaactggagggtggagagtcagcagaattcacgtgcttctcagaagatctcgtggcagagcagctgacctacatggatgcacaactcttcaagaaagtagtgcctcaccactgcctgggctgcatttggtctcgaagggataagaaggaaaacaaacatttggctcctacgatccgtgccaccatctctcagtttaataccctcaccaaatgtgttgtcagcaccatcctggggggcaaagaactcaaaactcagcagagagccaaaatcattgagaagtggatcaacatcgctcatgaatgtagactcctgaagaatttttcctccttgagggccatcgtttcggcactgcagtctaattccatctatcggttaaaaaagacttgggctgccgtcccaagggaccgaatgctgatgtttgaagaactttcagatatcttctcagaccataataaccatttgaccagccgagaactactgatgaaggaaggaacctcaaaatttgcaaacctggacagcagtgtgaaagaaaaccagaagcgtacccagaggcggctgcagctccagaaggacatgggtgtgatgcagggaactgtgccctacctgggcaccttcctgactgacctgaccatgcttgacactgcccttcaggactacatcgagggtggactgataaactttgagaaaaggagaagggaatttgaagtgattgcccagataaagctcttacagtctgcctgcaacagctattgcatgaccccagaccaaaagttcatccagtggttccagaggcagcagctcctgacagaggaggagagctatgccctgtcatgtgagattgaagcagctgctgacgccagcaccacctcgcccaagcctcggaagagcatggtgaagagactcagcctactgtttctagggtctgacatgatcaccagtcccactcccaccaaagagcagcccaagtccactgccagcgggagctctggtgaaagcatggactctgtcagcgtgtcatcctgcgagtcgaaccactcagaggctgaggagggctccattactcccatggacacccctgatgagcctcaaaaaaagctctctgagtcctcctcatcctgttcttctatccattccatggacacaaattcctcagggatgtcttccttaatcaaccccctctcctcccctccgtcctgcaacaacaaccccaaaatccacaagcgctctgtctcggtgacgtccattacctcgactgtgctgcctcctgtttacaaccaacagaatgaagacacctgcataatccgcatcagtgtggaagacaataacggcaacatgtacaagagcatcatgttgacgagccaggataaaacccccgctgtgatccagagagccatgctgaagcacaatctggactcagaccccgccgaggagtacgagctggtgcaggtcatctcggaggacaaagaacttgtgattccagactcagcaaatgtcttttatgccatgaacagccaagtgaactttgacttcattttgcgcaaaaagaactccatggaagaacaagtgaaactgcgtagccggaccagcttgacgttgcccaggacagctaaacggggctgctggagttacagacacagcaaaatcaccctctgaagggagggmccagtggccccttgtttgccaaaggcagagtggggctgagaaacaggctgcggtgattgcaattaccatccggtgttcgaggatcattggtgaagtcagcagatatttattgagttcctgtggtgtgcaaagcattatgataggcaccgtggggaaactggaaatgaatttgacatgaaaaggatgaacgattcactgattctctttgactcatttgagactaaaatgcagaattaccaacatttaaaacatatatatgcacatgtatttggtatgcatgtgtatctatataaaaatatataagagggactttatgggatagtatggactatggaaaaacaaatttgcacaatggcctgggaagttgaggtcactttttacagggaaatagaagaaactgagaacctagtctcgtatattctgagtaaatggaatcagtcctgggaatagagagtgtcctttgtgccagtattacaagaagcccaaactttatttttataaagggagaggatgactttctcaatcaagtgccaccagataaaaacaactgcagaggctggaactgccacaggctgtatgaaaggccactttggaaagggtttggatgagctggtggccttcaacctctgcctgcatctgccactttctgctaccctagggaggccaggaggagcttcggaggaccatcgccccactggtctagccatcatgacacctctggaggtgtcaagctcctgaaacaagctcatttcagtttctggcaaccccgtgtatttccgttttccccctaaagaacatatcataatcattgcacaaataaccatgttctttggtaatgaagccagaaaagaaagcgcaaaagaatggtgactcatttggactcttatctgtcttggaatgtcactgcttcattgccttctctgattgccttttgcatgtaaaactatgtgtctggagtcttttgccatctggatcttagtacctctttattatgtgcaatttattcctcaggtgtggaaatttctactgcaattgactgacgtktgattattttgagcttgtgaaagatttctgaacagtgattgtcccgttaatagcccctcagaagatgttccctgctgataacagcatcctattttacttacttttatagcattactgtgcctagtcgtggggaaagagatggggctgtatagattatctgaatcatttgtctaagaggtacattcttccagatggaatcaataacttttttttttccaggttcccgtgcttgctatcacagtatcattgttaagtgacacttttgtctctcataacaccatcacactcttccttccaagtctgagctgtgctggggtttgaactaaaagccatatgtggaatattgacatgtgtaagaagcactttcagaatgttgtcctttttaagaaatgattctcaaaataccagtttttattccaaaaatttagagaacaaacccggaatatgaagtgcagattgtaacatggagctatttttttttcctaatcccataatacagctcctaaaagttgtgtgggatttgcgttgcataaatagccatgtgaattccacaagaagcaccagggaaagtttagagatttgcggcaatggaccgaagaacgggccaggaagtcctccaatttcctttggtctttccaggagattggactacacattgtaaagactgactgggtttcaactagtcaaaaagcactttcttctgttttcaatccctgttcgatttgtgcttctgtgcttgtaggagagatggccagggtggcagccctcatgcaggttgaagtatatgtagcctcagcctgatattcttggtgcgaaggtaaaaaaaaaaaaaataaataaaaccattggcctggttgagggcgtgaccaccaagacatatatgttgtgcccgtgttcatcctgtgtatttatactgtatatgtagagtctagatttatatactgcaatgtaaaatatatatatatttaccttttttaaagacaatggaaattccaagtagctaaaacttagcttcatttatttaatgccactttaaatgtcttaaatttgtttcctggtggacagccgggtaatgcttttagctgctcgcatgcttgtctttctgcatctccatcatctgtttaccttttggttaaactaataaactagtttgggacttggctggcatgtgctgccagacccaaagggaaaaaaaaa

SEQ ID NO: 138 - DNA, 5514 bp, Homo sapiens
aatcccagcactttgggaggccgagatgggcggatcacttgaggccaaccaactcaaacttgaagacatgaaatccccaaggagaaccactttgtgcctcatgtttattgtgatttattcttccaaagctgcactgaactggaattacgagtctactattcatcctttgagtcttcatgaacatgaaccagctggtgaagaggcactgaggcaaaaacgagccgttgccacaaaaagtcctacggctgaagaatacactgttaatattgagatcagttttgaaaatgcatccttcctggatcctatcaaagcctacttgaacagcctcagttttccaattcatgggaataacactgaccaaattaccgacattttgagcataaatgtgacaacagtctgcagacctgctggaaatgaaatctggtgctcctgcgagacaggttatgggtggcctcgggaaaggtgtcttcacaatctcatttgtcaagagcgtgacgtcttcctcccagggcaccattgcagttgccttaaagaactgcctcccaatggacctttttgcctgcttcaggaagatgttaccctgaacatgagagtcagactaaatgtaggctttcaagaagacctcatgaacacttcctccgccctctataggtcctacaagaccgacttggaaacagcgttccggaagggttacggaattttaccaggcttcaagggcgtgactgtgacagggttcaagtctggaagtgtggttgtgacatatgaagtcaagactacaccaccatcacttgagttaatacataaagccaatgaacaagttgtacagagcctcaatcagacctacaaaatggactacaactcctttcaagcagttactatcaatgaaagcaatttctttgtcacaccagaaatcatctttgaaggggacacagtcagtctggtgtgtgaaaaggaagttttgtcctccaatgtgtcttggcgctatgaagaacagcagttggaaatccagaacagcagcagattctcgatttacaccgcacttttcaacaacatgacttcggtgtccaagctcaccatccacaacatcactccaggtgatgcaggtgaatatgtttgcaaactgatattagacatttttgaatatgagtgcaagaagaaaatagatgttatgcccatccaaattttggcaaatgaagaaatgaaggtgatgtgcgacaacaatcctgtatctttgaactgctgcagtcagggtaatgttaattggagcaaagtagaatggaagcaggaaggaaaaataaatattccaggaacccctgagacagacatagattctagctgcagcagatacaccctcaaggctgatggaacccagtgcccaagcgggtcgtctggaacaacagtcatctacacttgtgagttcatcagtgcctatggagccagaggcagtgcaaacataaaagtgacattcatctctgtggccaatctaacaataaccccggacccaatttctgtttctgagggacaaaacttttctataaaatgcatcagtgatgtgagtaactatgatgaggtttattggaacacttctgctggaattaaaatataccaaagattttataccacgaggaggtatcttgatggagcagaatcagtactgacagtcaagacctcgaccagggagtggaatggaacctatcactgcatatttagatataagaattcatacagtattgcaaccaaagacgtcattgttcacccgctgcctctaaagctgaacatcatggttgatcctttggaagctactgtttcatgcagtggttcccatcacatcaagtgctgcatagaggaggatggagactacaaagttactttccatatgggttcctcatcccttcctgctgcaaaagaagttaacaaaaaacaagtgtgctacaaacacaatttcaatgcaagctcagtttcctggtgttcaaaaactgttgatgtgtgttgtcactttaccaatgctgctaataattcagtttggagcccatctatgaagctgaatctggttcctggggaaaacatcacatgccaggatcccgtaataggtgtcggagagccggggaaagtcatccagaagctatgccggttctcaaacgttcccagcagccctgagagtcccattggcgggaccatcacttacaaatgtgtaggctcccagtgggaggagaagagaaatgactgcatctctgccccaataaacagtctgctccagatggctaaggctttgatcaagagcccctctcaggatgagatgctccctacatacctgaaggatctttctattagcatagacaaagcggaacatgaaatcagctcttctcctgggagtctgggagccattattaacatccttgatctgctctcaacagttccaacccaagtaaattcagaaatgatgacgcacgtgctctctacggttaatgtcatccttggcaagcccgtcttgaacacctggaaggttttacaacagcaatggaccaatcagagttcacagctactacattcagtggaaagattttcccaagcattacagtcaggagatagccctcctttgtccttctcccaaactaatgtgcagatgagcagcacggtaatcaagtccagccacccagaaacctatcaacagaggtttgttttcccatactttgacctctggggcaatgtggtcattgacaagagctatctagaaaacttgcagtcggattcgtctattgtcaccatggctttcccaactctccaagccatccttgctcaggatatccaggaaaataactttgcagagagcttagtgatgacaaccactgtcagccacaatacgactatgccattcaggatttcaatgacttttaagaacaatagcccttcaggcggcgaaacgaagtgtgtcttctggaacttcaggcttgccaacaacacaggggggtgggacagcagtgggtgctatgttgaagaaggtgatggggacaatgtcacctgtatctgtgaccacctaacatcattctccatcctcatgtcccctgactccccagatcctagttctctcctgggaatactcctggatattatttcttatgttggggtgggcttttccatcttgagcttggcagcctgtctagttgtggaagctgtggtgtggaaatcggtgaccaagaatcggacttcttatatgcgccacacctgcatagtgaatatcgctgcctcccttctggtcgccaacacctggttcattgtggtcgctgccatccaggacaatcgctacatactctgcaagacagcctgtgtggctgccaccttcttcatccacttcttctacctcagcgtcttcttctggatgctgacactgggcctcatgctgttctatcgcctggttttcattctgcatgaaacaagcaggtccactcagaaagccattgccttctgtcttggctatggctgcccacttgccatctcggtcatcacgctgggagccacccagccccgggaagtctatacgaggaagaatgtctgttggctcaactgggaggacaccaaggccctgctggctttcgccatcccagcactgatcattgtggtggtgaacataaccatcactattgtggtcatcaccaagatcctgaggccttccattggagacaagccatgcaagcaggagaagagcagcctgtttcagatcagcaagagcattggggtcctcacaccactcttgggcctcacttggggttttggtctcaccactgtgttcccagggaccaaccttgtgttccatatcatatttgccatcctcaatgtcttccagggattattcattttactctttggatgcctctgggatctgaaggtacaggaagctttgctgaataagttttcattgtcgagatggtcttcacagcactcaaagtcaacatccctgggttcatccacacctgtgttttctatgagttctccaatatcaaggagatttaacaatttgtttggtaaaacaggaacgtataatgtttccaccccagaagcaaccagctcatccctggaaaactcatccagtgcttcttcgttgctcaactaagaacaggataatccaacctacgtgacctcccggggacagtggctgtgcttttaaaaagagatgcttgcaaagcaatggggaacgtgttctcggggcaggtttccgggagcagatgccaaaaagactttttcatagagaagaggctttcttttgtaaagacagaataaaaataattgttatgtttctgtttgttccctccccctcccccttgtgtgataccacatgtgtatagtatttaagtgaaactcaagccctcaaggcccaacttctctgtctatattgtaatatagaatttcgaagagacattttcactttttacacattgggcacaaagataagctttgattaaagtagtaagtaaaaggctacctaggaaatacttcagtgaattctaagaaggaaggaaggaaggaaggaaggaaagaagggagggaaacagggagaaagggaaaaagaagaaaaagagaaagatgaaaataggaacaaataaagacaaacaacattaagagccatattgtaagatttccatgttaatgatctaatataatcactcagtgcaacattgagaatttttttttaatggctcaaaaatggaaactgaaagcaagtcatggggaatgaatactttgggcagtatcttcctgatgtcttcttagctaagaggaggaaaaaaaggctgaaaaaatagggaggaaattccttcatcagaacgacttcaagtggataacaatatttataagaaatgaatggaaggaaatatgatcctcctgagactaactttgtatgttaaggtttgaactaagtgaatgtatctgcagaggaagtattataaagatatgtcattagatccaagtgctgattaaatttttatagtttatcagaaaagccttatattttagtttgttccacattttgaaagcaaaaaatatatatttgatatacccttcaattgccaaatttgatatgttgcactgaagacagaccctgtcatatatttaatggcttcaagcaggtacttctctgtgcattatagaatagattttaataatcttatagcattgtatattattattgctgttgtcactgttattattattgtggatactggcccttggtgtgttgcatagctccctatgtattctctgtttccatctttaagttcccagaccaatatacattaagagttttgcatggtctaaattgtgtttattccaaccacgtggaaagctcctggaaagaaattttacattcggttgttctgtgctcctaatgacacttgaccttgttgaacaaatggcagagcctttcccaaggatttgattgtttgtgaattatctgcatgtgtgcttttttttggtgtgtatttcattaaaaaatataaatatttatgaaaaaaaaaaaaaaaa

SEQ ID NO: 139 - DNA, 4127 bp, Homo sapiens
agacgcctcgaagaatccgctatcggctgtctgcacaaccggaatcatgtcgagtttggcggtgagagacccggcaatggatcgatcactgcgttccgtgttcgtggggaacattccatatgaggcaactgaggagcagttaaaggacattttctcggaggttggttctgttgtcagtttccggctggtatacgatagagagacgggaaaacccaagggctatggcttctgcgaataccaagaccaggagaccgcgcttagtgccatgcggaacctcaatgggcgggagttcagtgggagagcgcttcgggtggacaatgctgccagtgaaaagaataaggaggagttaaagagccttgggcctgcagcgcccattattgactcaccctatggggatcccatcgatccagaagatgcccctgaatcgattaccagagcagtagccagtctccccccggagcagatgtttgagctgatgaagcagatgaagctctgtgtccaaaacagccaccaggaagctcgaaacatgttacttcaaaatccacaactggcttatgcactgttgcaggcacaagtagtgatgagaatcatggatccagagattgctctgaaaattctgcatcggaagatacatgtcacaccactgatcccaggcaaatctcagtctgtgtctgtctctggccctggccctggccctggccctgggctctgcccaggacctaatgttctgctgaaccagcagaatcctccagctcctcagcctcagcatttggctagaagacctgtgaaggacattcctcctctgatgcagactcctatccagggtggaattccagctccagggccaataccagctgcagttcccggagctggtcctggttccttaactcctggaggagcaatgcagccccaacttggaatgccaggggttggcccagtgcctttagagcggggacaagtgcagatgtcagatcctagagctcctatacctcgcggacccgtgactcctggtggtctgcctcctcgaggactgttaggagatgctccaaatgacccacgtggagggactttgctttcagtcactggagaagtggagcccagaggttatctgggtccaccccatcagggtccccccatgcatcatgcctctggtcatgacactcgtggcccttcctcacatgagatgaggggagggccattaggagatcccagactgctaattggagagcccagaggccccatgatagatcaaaggggtctacctatggatggtagaggtggtagagattctcgagcgatggagactcgtgccatggaaactgaggtcttagagacacgtgtaatggagaggagaggaatggagacctgtgcgatggaaaccagagggatggaagcaaggggcatggatgcaagaggattggagatgaggggccctgtccccagttcaagaggccctatgactggtggaattcagggtcctggtcccattaatataggggcaggtggccctcctcagggacccagacaggtcccaggcatttcaggggtggggaatcctggagctggtatgcagggtacaggcatacaaggaacaggcatgcagggagcaggcatacaaggaggagggatgcagggggcaggcatacaaggagtcagtatacaaggaggaggtatacaaggaggaggtatacagggggcaagcaagcaaggtggaagccagcctagcagttttagtcctgggcagagccaggtcactccacaggatcaggagaaggcagctttgatcatgcaggttcttcaactgactgcagatcagattgccatgctgccccctgagcaaaggcagagtatcctgattttaaaggaacaaatccagaaatccactggagcgtcttgaaaggttttagaaaatatttggctgtagtctcaaattttattctgtagcatggagaatgggtgcaaaaagctgacttctgtatccccacacttggattagggtttccctcctcctagaacctaatcttattttttgttctttttctttctttctgttttccttttttttttaattgagggtggggggaggagggagtgcgtctgttcactttaagttactttaaaataactctgaacatgattatattatgccaaataagattacaaagaataagcagcaatattgaagcatctacagtatgttaactacattttttaaatgtcgagtaaaacttcgtgaaaactgctcataaagactaaaagttgacctgttaaaacgttaatgtactaagatagttttaagatttttggttgtataacaaaataaaagtttacccaaaagtataagatacattttttggtaaaccatttaaaatacaaaatcctattttggaggcaataggataagcattgtcttagtgttttagaattatttttgaaacagagttaacaggataaggttacacttgtattagaattgtttttttctaaagttatgttacctgaaaaatcaaggagtgcacctgatttactgttgcttcatttatcccatccttcagagaccagcaaggttctgccaggccccaagcatctgagcatgatgattttgctgtgacaattctaagatcaaccaggttacttaagtccgctctgatgaaacccagtctctcaataccttcctatttctcaatagtctttaagccctaaatctgagtcagtaattctctaaaaatccttcccaaaaatcagtgtctagggactggttgatctagatgagttataaatggtatttgacttttcataagtagtggaaggtttcactaagtaaagatctgagtttcttggtatctgacgtttgtatacagatggtgtccatttgctcaaccagacaggagttaacttgtattagaattgttttttctaaagttatgttacctgagaaattaaggactgcacctggtttaatgttgcttcacttatcccaccctacagagaccagcaaggttctgccaggcctcgagcatccaagcatgattttgctgtgacaaatctaaaatcaaccaggctacttaagtctgctctgatgaaacccaataatctctcaataccttcctatttctcaatagtctttaaaccctaaatctgagtcagtaattctcttacatccttcccaaaaatcagtgtctagggactagttgatctggatgagttatacatgatatttgacttttcataagtagtggaaggtttcactaagtaaaactctcagtttcttggtatctggctttcttatacagatggtgtccatttgctccaccagacaggagttaaaaacctttaaagagcatttaacatgccttttagttttcttatttcataatctacttttctatcattaatcatcttaccaggaataatcaaggcccaggtaggtagaagtttttatatagcctgaatactcacttgacttactgctcattttactttttgcatggaatacagccatttagtcctaatatacataccaatgagacaattaaaaattggttggaagatggagcttatcacattgtgctactacgactttattttttcttgaaaataaagccttgaggatgtgaacataaatgttggtatcataaaacaagtagtaataaaagcataaattatcaaatatcaggtgatcttactatggagaagaaaaaccaatatctagttacagatgaaaaaatgtttaatacaaagagctgaaaatgtagaaattgagttatcttccctttgcaaaatttttacactttaaattagtaattctttgtttgcaaggttttcatccctatgctgttgttttctactacctgttttactcttgttcatactgctactttcccatgtttcctatatgcctcccctatattggagaggataactcgcgtttacatatgtgatagttatgcttaatactaattcacagagttggctcgatcattttgagattctagttgctttatctcaaagctttcactgaagggctgtaactgaaaattattaaatgttagtctttagtcaaatctctgcattgtttcatgcagaaaataaagatacaattaaggctgaaaaaaaaaaaaaaaaaa

SEQ ID NO: 140 - DNA, 4871 bp, Homo sapiens
ccgcagggtagggtgcgggaccggggggacctggaggcagaggggagaaccggccgtccgcgccgcagcacagccgctgggagcgcctcagaccccgcgcggggcgccggctccatggcgaccgggctcggggagccggtctatggactttccgaagacgagggagagtcccgtattctcagagtaaaagttgtttctggaattgatctcgccaaaaaggacatctttggagccagtgatccgtatgtgaaactttcattgtacgtagcggatgagaatagagaacttgctttggtccagacaaaaacaattaaaaagacactgaacccaaaatggaatgaagaattttatttcagggtaaacccatctaatcacagactcctatttgaagtatttgacgaaaatagactgacacgagacgacttcctgggccaggtggacgtgccccttagtcaccttccgacagaagatccaaccatggagcgaccctatacatttaaggactttctcctcagaccaagaagtcataagtctcgagttaagggatttttgcgattgaaaatggcctatatgccaaaaaatggaggtcaagatgaagaaaacagtgaccagagggatgacatggagcatggatgggaagttgttgactcaaatgactcggcttctcagcaccaagaggaacttcctcctcctcctctgcctcccgggtgggaagaaaaagtggacaatttaggccgaacttactatgtcaaccacaacaaccggaccactcagtggcacagaccaagcctgatggacgtgtcctcggagtcggacaataacatcagacagatcaaccaggaggcagcacaccggcgcttccgctcccgcaggcacatcagcgaagacttggagcccgagccctcggagggcggggatgtccccgagccttgggagaccatttcagaggaagtgaatatcgctggagactctctcggtctggctctgcccccaccaccggcctccccaggatctcggaccagccctcaggagctgtcagaggaactaagcagaaggcttcagatcactccagactccaatggggaacagttcagctctttgattcaaagagaaccctcctcaaggttgaggtcatgcagtgtcaccgacgcagttgcagaacagggccatctaccaccgccatcagtggcctatgtacataccacgccgggtctgccttcaggctgggaagaaagaaaagatgctaaggggcgcacatactatgtcaatcataacaatcgaaccacaacttggactcgacctatcatgcagcttgcagaagatggtgcgtccggatcagccacaaacagtaacaaccatctaatcgagcctcagatccgccggcctcgtagcctcagctcgccaacagtaactttatctgccccgctggagggtgccaaggactcacccgtacgtcgggctgtgaaagacaccctttccaacccacagtccccacagccatcaccttacaactcccccaaaccacaacacaaagtcacacagagcttcttgccacccggctgggaaatgaggatagcgccaaacggccggcccttcttcattgatcataacacaaagactacaacctgggaagatccacgtttgaaatttccagtacatatgcggtcaaagacatctttaaaccccaatgaccttggcccccttcctcctggctgggaagaaagaattcacttggatggccgaacgttttatattgatcataatagcaaaattactcagtgggaagacccaagactgcagaacccagctattactggtccggctgtcccttactccagagaatttaagcagaaatatgactacttcaggaagaaattaaagaaacctgctgatatccccaataggtttgaaatgaaacttcacagaaataacatatttgaagagtcctatcggagaattatgtccgtgaaaagaccagatgtcctaaaagctagactgtggattgagtttgaatcagagaaaggtcttgactatgggggtgtggccagagaatggttcttcttactgtccaaagagatgttcaacccctactacggcctctttgagtactctgccacggacaactacacccttcagatcaaccctaattcaggcctctgtaatgaggatcatttgtcctacttcacttttattggaagagttgctggtctggccgtatttcatgggaagctcttagatggtttcttcattagaccattttacaagatgatgttgggaaagcagataaccctgaatgacatggaatctgtggatagtgaatattacaactctttgaaatggatcctggagaatgaccctactgagctggacctcatgttctgcatagacgaagaaaactttggacagacatatcaagtggatttgaagcccaatgggtcagaaataatggtcacaaatgaaaacaaaagggaatatatcgacttagtcatccagtggagatttgtgaacagggtccagaagcagatgaacgccttcttggagggattcacagaactacttcctattgatttgattaaaatttttgacgaaaatgagctggagttgctcatgtgcggcctcggtgatgtggatgtgaatgactggagacagcattctatttacaagaacggctactgcccaaaccaccccgtcattcagtggttctggaaggctgtgctactcatggacgccgaaaagcgtatccggttactgcagtttgtcacagggacatcgcgagtacctatgaatggatttgccgaactttatggttccaatggtcctcagctgtttacaatagagcaatggggcagtcctgagaaactgcccagagctcacacatgctttaatcgccttgacttacctccatatgaaacctttgaagatttacgagagaaacttctcatggccgtggaaaatgctcaaggatttgaaggggtggattaagcaccctgtgcctcgggggtggttgttcttcaagcaagttctgcttgcacttttgcatttgcctaacagacttttgcagaggcgatggcagagagcagctgcaggcatggtccctggagccgagccttcaccacgcactcgtccaagttcggatgcgggaacctggtcccagcttgagttcctgcctttcccaccacaaattatcaactggttgatgtgtacactaattacatttcaggaggacttaatgctatttatgttgtgcctctgcaggcaaagcccttaataaatattttacatcctttctaatgacaatgaatggaattaatcactcaacaggtatagtattacgactcatgtttactttttaaaatgatttagaccgattttcagattttatttcgttatgattaaagatgtctcatgtacttggaaaagtgagcatttttttttttttttgtatttcactttcataccaggcttaatgtcaatgacatttttatttttgaagtactctgacacctccaccctctactttattagaattggaaggcaaatttttgtccaaaaacctacagacaagtactttgagagaatttccaatataatattagacataatgataattttttccatactcagaatgaaaaactggatattacgtttttgttttggggtttttttgtacaaatttagctaatagctacaggctgagagaattgtaacatagcatgacaaattttgtgttgacttgaaaggaatcacaccattattccttagaagtaattacatgtgttctaacacatttgagacagggttggactcccatttctcatccgagaaattacttaacccttcctggcgctgtacagtcatcttttattctatttcctctttgctgtttgtagtagagacattttgaatgaaacttggcactgcttgattcaaaactgtggaaaccagatctgtttagtctcctgtttgtatgcgtttgctaatggtagctaaataaccagtttttgttgtaaatgcaccaattctgaaggcactttatgtactacatggaggtcatatctggttttgtttttatttttttatcatgaacattaaatgtgatgatgatttcttttccctgcacacatctttccggtgcaatatctatcaattgtgaatctggctgctggtgtataaaaacctggatgtaaagctgagcctacagacctgtcctcaccaactgttttgtgatttctactcaactacaaagatttatttaatgtactcttaatctaactgagttttgttaccaatgacctgttgcatgcttcaataccgtgtactgcctgagttgtgcctcttgtgtgctagattaaaagtgagacagagacttgacttgatcctctgagctcaagctattgagctggtagtggcagaggactgagggtacctgcacagtttgattcttttccacgtgtaagtctccattgcagaattgtcgtgctttgagaaaacacctgaggcagtgtgggagttgaacgaccctgctgtcctttttaacctgtgttgtcctagaccctgtcggggcagtcaggggacactagagatttgatctcatgcgagtcatcaataggacaaaaaagttgtggtttggggaggtctgtttgttacataaaaaggacctttcggtgtaagaaattgccgtttttaccctgccctggctggcatgtgagaagccatggaaggttgtggttgtaaatgagttgtctaaaggggtgcagaggcctgaggtttctaaaagaaggtagatttctacagagctgagtgttggttcctttttcttattggttgaaaattacctggtagtgatcagaaaacttagatgctatgtaact

SEQ ID NO: 141 - DNA, 1147 bp, Homo sapiens
aggcggcaggaggcgggtgggtcaaggtaactctgggctacagagtccttgctgggggttcggggagcgcttggaccccggcttctgggacgcgtcaggagaagggagcactggctttgctttcatcaggccaaagatgcctttctttgggaatacgttcagtccgaagaagacacctcctcggaagtcggcatctctctccaacctgcattctttggatcgatcaacccgggaggtggagctgggcttggaatacggatccccgactatgaacctggcagggcaaagcctgaagtttgaaaatggccagtggatagcagagacaggggttagtggcggtgtggaccggagggaggttcagcgccttcgcaggcggaaccagcagttggaggaagagaacaatctcttgcggctgaaagtggacatcttattagacatgctttcagagtccactgctgaatcccacttaatggagaaggaactggatgaactgaggatcagccggaagagaaaatgaagaccccagagacatttattggggagtaggatgtggctgagtgctttttttttggccagactagcggattcagtcctggaagagagtatcatataatgagacccacaggcactggcacccttgggttggcaatagaaggtgacatggaatggagaaaaccaagattccagatggggatagtaactagaaggtgcttcagatgcactgcctgcgggtgccagtctgaaaaccagaccgcacagaggcctggggctgctgatgagctttttggtgctctccacacacaagctcgcaaacacacatgtcccagaatagctctgttgggttgtgttgggagaagcggctggagttcattctctcacccccttatgttggtgtttggcgtgtgacagcagttctacagagctctgtgttggggtcatggatgagcggctctcttggctcttaaaggcaggcctctctcttcttgcctttaaagaatcctccttcctcacacctggcctcctctggcttcagcttctcagcagcaagcaccagccttccacaacaacactatatttttatgctactttcctgtttgcactactacttttttattaaacgatgttaaataaaaaaaaaaaaaaaaaa

SEQ ID NO: 142 - DNA, 2972 bp, Homo sapiens
acgcgcggagcgccgggtgcggccatgcggggaccgggcccgaccccgagcccgaccccgagcccaagcccgagccggagcccgagcgagaccccgagcccgagcccgagcgcgacccccggtgcggcgcggctaccccggcggaggcggcgggcgcggggcgcgctctgaggcccgggggatgcgccgccgcctcgaccatgggcgccgccgcctccaggaggagggcgctgaggagcgaggccatgtcctcggtggcggccaaagtgcgagcagcccgagcgtttggagagtacctgtcccagagtcaccctgagaaccgcaacggcgcagatcacctgctggctgatgcctactctggccacgacgggtcccccgagatgcagccggccccccagaacaagcgccgcctgtccctcgtctccaacggctgctacgagggcagcctctcagaggagcccagcattaggaagcccgcaggcgagggccctcagcctcgagtgtacaccatctctggggagcctgccctgctgcccagccctgaggcggaggccattgagctggcggtggtgaaggggcggcggcagcggcaccctcaccatcacagccagcccctgcgcgccagccctggtggcagccgggaggacgtcagcaggccctgccagagctgggcgggcagccgccagggctccaaggagtgccccggatgtgcccagctggctcctggccccacccctcgggcctttgggctggaccagccacctctgcctgagacctccggtcgccgcaagaagctggagaggatgtacagcgttgaccgtgtgtctgacgacatccctattcgtacctggttccccaaggaaaatcttttcagcttccagacagcaaccacaactatgcaagcggtgttcaggggctacgcggagaggaagcgccggaaacgggagaatgattccgcgtctgtaatccagaggaacttccgcaaacacctgcgcatggtcggcagccggagggtgaaggcccagacgttcgctgagcggcgcgagcggagcttcagccggtcctggagcgaccccacccccatgaaagccgacacttcccacgactcccgagacagcagtgacctgcagagctcccactgcacgctggacgaggccttcgaggacctggactgggacactgagaagggcctggaggctgtggcctgcgacaccgaaggcttcgtgccaccaaaggtcatgctcatttcctccaaggtgcccaaggctgagtacatccccactatcatccgccgggatgacccctccatcatccccatcctctacgaccatgagcacgcaaccttcgaggacatccttgaggagatagagaggaagctgaacgtctaccacaagggagccaagatctggaaaatgctgattttctgccagggaggtcctggacacctctatctcctcaagaacaaggtggccacctttgccaaagtggagaaggaagaggacatgattcacttctggaagcggctgagccgcctgatgagcaaagtgaacccagagccgaacgtcatccacatcatgggctgctacattctggggaaccccaatggagagaagctgttccagaacctcaggaccctcatgactccttatagggtcaccttcgagtcacccctggagctctcagcccaagggaagcagatgatcgagacgtactttgacttccggttgtatcgcctgtggaagagccgccagcactcgaagctgctggactttgacgacgtcctgtgaggggcagaggcctccgcccagtcaccatcaggccactccctctgcaccgggacctggggctgggccgcctcgtgctccccgggactgtgtggctccggtctcgcctggagccacttcagggcacctcagacgttgctcaggttccccctgtgggttccggtcctcgctgcacccgtggccgcagaggctgcagtccctgggggccgggaggatcccgccctgtggcccgtggatgctcagcggccaggcactgacctgccatgcctcgcctggaggctcagctgtgggcatccctccatggggttcatagaaataagtgcaatttctacacccccgaaacaattcaaagggaagcagcatttcttgttaactagttaagcactatgctgctagttacagtgtaggcaccccggcccagcagcccagcagcccacatgtgttcaggaccctccctgcccaccccctccctgccgtatcgatcaccagcaccagggtggcccgtgtgcgtggggccagcgtcgccgggctgcccagcctggctctgtctacactggccgagtctctgggtctgtctacactggccgagtctccgactgtctgtgctttcacttacactcctcttgccaccccccatccctgcttacttagacctcagccggcgccggacccggtaggggcagtctgggcagcaggaaggaagggcgcagcgtcccctccttcagaggaggctctgggtggggcctgctccccatccccccaagcccacccagcactctcattgctgctgttgagttcagcttttaccagcctcagtgtggaggctccatcccagcacacaggcctggggcttggcaggggcccagctggggctgggccctgggttttgagaaactcgctggcaccacagtgggcccctggacccggccgcgcagctggtggactgtaggggctcctgactgggcacaggagctcccagcttttgtccacggccagcaggatgggctgtcgtgtatatagctggggcgagggggcaggccccccttgtgcagagccaggggtctgagggcacctggctgtgttcccagctgagggagggctggggcgggggccgggcttggaacgatgtacgataccctcatagtgaccattaaacctgatcctccaccgcgaaaaaaaaaaaaaaaa

SEQ ID NO: 143 - DNA, 4999 bp, Homo sapiens
ggaagcccgggagtgagagaaagcggctccgggggcatagcgggccagtaagggccgctcctcctttgaagaggttttgcgtctctttccgccggtggcgtcggcgctcacgcaggggcgggtcccggtagcgccaggcggtgcagggcgggaaggggattcgtggcgacggcggcggcaagggacagcaggagcagtggtgctgtcagcgcggccgtcggagacatgggagacccggggtcggagataatagaatctgtccctccagctggccctgaggcatctgagtcaacaacggatgaaaatgaagacgacattcagtttgtcagtgaaggaccattacgacctgttcttgaatacattgatctggtcagcagtgatgatgaagagcctagcacctcttatactgatgagaatattaaacgtaaagaccatattgattatcagaaggataaagttgctttaactctggctcgtctagcccgccatgttgaagtggagaaacagcagaaagaagagaagaatagagcattcagagaaaaaattgattttcagcatgctcatgggttacaagaattggaatttattcgaggacattctgatacagaagcagcaagactgtgtgtggaccagtggctaaaaatgccaggactcaaaacaggcacaattaattgtggaacaaaaagttcattccgaagaggaggccacacgtgggtgtctgggaaaccaactttatgtcctataatgcactgtaacaaggagtttgacaatgggcaccttctcttaggacatttgaaaaggttcgatcactctccatgtgatccaacaattacactacatggacctttcttcagctcctttgcttgtgtagtatgttataaaaaatttgttactcaacaacaatatagagatcacctttttgataaggaagccacagatgatggacataacaacaaccttcttcctcagattattcagtgttttgcatgtccaaattgcttccttctttttagcagaaaggaggagtgttcaaagcatatgtctggaaagaatcatttccatcagagtttcaaactgggtgataacaaaggaattgcacatccaatatctttcccatcttttgcaaagaaacttttgatctctctgtgcaaagatgttccctttcaagttaagtgtgtggcctgccacaagacactgcgttcccacatggagctcactgcccatttcagagttcattgtcgaaatgctggacctgtagctgtagctgagaagagcattacccaggttgcagagaaattcatattaagaggttattgtccagattgcaatcaagtctttgtggatgaaaccagcacccaaaatcataagcagaattcaggacacaaagtccgagtcattaactcagtggaagaatcagtcttactctattgccacagcagcgaagggaacaaggatccttcttctgacttgcatttattgttggatcaatcaaaattttcatcacttaaaagaaccatgtctattaaagaatctagctcactggagtgcattgccattccaaaaaagaagatgaatttaaaagataaaagccatgaaggtgttgcttgtgtccagaaagaaaaatcagtagttaaaacctggttctgtgaatgcaatcagcgattcccaagtgaagatgcagtagaaaagcatgttttctcagcaaacacaatgggttataaatgtgtggtctgtggaaaggtatgtgatgattcaggggtcattcgtttacacatgagccggattcacggaggggcacatttaaataactttcttttctggtgtcggacatgcaaaaaggagttaacaaggaaagatactatcatggcacatgtgactgaatttcataatggacacagatatttttatgagatggatgaggtagaaggtgaaactttgccatcatcctctacaacattggataatttgactgctaacaagccttcatcagctattactgttattgatcattccccggcaaatagttctccgaggggtaaatggcaatgccggatttgtgaagatatgtttgattcccaggaatatgtaaaacagcactgcatgtctttggcaagccacaagtttcatagatacagctgtgctcactgcagaaagccttttcataagatagaaacattgtaccgacattgccaagatgagcatgacaatgagataaagattaaatacttctgtgggctttgtgatcttatctttaatgtggaagaagcatttctgagtcattatgaggagcaccacagcatagattatgtatttgtgtcagaaaaaactgaaacttcaattaaaaccgaagatgattttccagtaatagagaccagtaaccagttaacttgtggttgccgtgagagttacatctgtaaagtcaacagaaaagaagattatagcagatgtctccaaatcatgctggataaaggaaaactgtggtttcgctgcagtttatgttcggcaacagcacagaatttaaccgacatgaacactcatatccatcaagtgcacaaagaaaagagtgatgaggaggagcagcagtatgtaatcaagtgtggcacctgcaccaaagcatttcatgatcctgagagtgcacagcagcatttccatagaaaacattgcttcttacagaaacccagtgtggctcattttggatctgaaaaatcaaacctgtacaagtttactgctagtgcctcacatacagagagaaaactgaaacaggcaataaactattcaaaaagtttagacatggagaaaggagttgagaatgacctaagctatcagaatataggaggaaacaccaattggaagcctccgctcaactgtaagatttataactacctgaacaggattggatgcttcttccttcatcctcgctgtagtaaaagaaaagatgctgctgattttgccatatgtatgcatgctggccgtctagatgaacaactacccaagcaaattcctttcaccatcctctcaggagatcaaggttttctggagctagagaatcaatttaagaagactcagaggccagctcatatactaaaccctcaccacttagagggagatatgatgtgtgccttgttaaatagcatatctgataccaccaaagaatgtgacagtgatgataacatgggtgccaaaaatacttcaataggagaagaatttatatccacagaagatgtggaattagaagaagctattagaagaagtcttgaggaaatgtaattaaagatattaccacacaacatcaagtggccttgaagagactgagataacgaattcttgagtttgttttctaaaggagaccagaaatccactattacaaatgtatttgaaaacatgtttttgctttcatatgttcaaaatttgatctttgttttgtatttttgtgctaatgtgcaaacatgtacagaagaaatagaatacatgttcatgcaaatataaattatgtattctaatataggtgtaacagtttcccagttaactttgaatttatatatttagatttaaaggattaaaaaaaaggaaagctcttgacagttgtttcccaaatagcattagttctttaattttatttgtactgtacaaatgatgctagtttatttttttagcagtgaaaatgaatataaaaaaggtgacataggtcaagttttccataaattctacttctcatgtggcactattatataatacctttgagatctttgtttatgtttattagaagagggtaatggaaactgatcatggaaacatttaaaattttatcagcaatgttctttgtgggtgccatgcatatgtaaattattgctttaattagagcagcacattgctaaaataaaaaatacaccttaatttttaagaaataatttaaatgaaacaatttccattccttttacctgcttagacttttatgtgacttgtatggtctcctggttaaagggaatggtgtcagaatatttgcataaaattatttttcataacagtccttttttatatattggtgtaaacataatattcttcaagaaataatgttgaaagcctactcaggaataatcttccttaactctttaaatttttatttcatgtgaagtgttttcagtttagttattcactgaattgtcagtttccttcatttggtattacatatttaattcttaaatattgaggccccattgtgagtaataaaaaatacgacataagtagaagactaagaagggcttgtcatattatctttgtgtatatgcttcatgttatttaaccagaaatgtcttatctctaaaaatttttagtagtaattatttaccaaacttaaaaacatttctataaatataaagcttttctttatatttaagacaaaatataaaggctagaatttggttccttctctgtaacactaaatattttagtgtgaaattgaatttttttattactatagtcttttcaatctataatttgtgtttttaatttcttgatatgtcacttctgttcctccctgcttgcattttttaaaaactagacattgtggcttgagaatttatcaatcatctttccgaaatgaccacattgtgcttttagtttgtatgtttaagtggtcaagcaaggctctaggaggtagtcactgagctggaccttaaacacatctgcaggagctcacaaaatgggagcaaaagaggcattccagaaagaagagtagttaagcagatgtgggggcagggcaagaggagacagcaccttgttgccagagattctacacaaaggtgtgatggacactgatgctctattaagaagcttttgtggtgtgtgtggtagagaataattaaggcttctgataagacaggaaagggatatttcatcatgactgttaagaaaaggtaactgggttgtttaatgttttaattgataattgtcactgatcgtatttctacttgttaaataattaaaaatcatcttaaaattc

SEQ ID NO: 144 - DNA, 3389 bp, Homo sapiens
agcgggcgtgcggagcgggcgacagtggcgtgggatctgcctctctgcgagcagctgggagcggcggcggcggcgccatgagcgggggcaccccttacatcggcagcaagatcagcctcatctccaaggcggagatccgctacgagggcatcctctacaccatcgacaccgaaaactccaccgtagcccttgccaaagttcgatcctttggtacagaagacagaccgacagatcgtccaataccacctcgagatgaagtctttgaatacattatattccgtgggagtgacattaaagaccttactgtttgtgagccaccaaaaccacagtgttctttgcctcaagacccagctattgttcagtcctcactaggctcatcgacttcttcattccagtccatgggttcttatggacctttcggcaggatgcccacatacagtcagttcagtccgagttccttagttgggcagcagtttggtgctgttggtgttgctggaagctctttgacatcctttggaacagaaacatcaaacagtggtaccttaccccaaagtagtgcggttggttctgcctttacacaggatacaagatctctaaaaacacagttatctcaaggtcgctcaagccctcagttagaccctttgagaaaaagcccaaccatggaacaagcagtgcagaccgcctcagcccacttacctgctccagcagctgttgggagaaggagtcctgtatcaaccaggcctttgccatctgccagccaaaaggcaggagagaatcaggagcacaggcaagctgaagtacacaaagtttcaaggccagaaaatgagcaactcagaaatgataacaagagacaagtagctccaggtgctccttcagctccaaggagagggcgtgggggtcatcggggtggcaggggaagatttggtattcggcgagatgggccaatgaaatttgagaaagactttgactttgaaagtgcaaatgcacaattcaacaaggaagagattgacagagagtttcataataaacttaaattaaaagaagataaacttgagaaacaggagaagcctgtaaatggtgaagataaaggagactcaggagttgatacccaaaacagtgaaggaaatgccgatgaagaagatccacttggacctaattgctattatgacaaaactaaatccttctttgataatatttcttgtgatgacaatagagaacggagaccaacctgggctgaagaaagaagattaaatgctgaaacatttggaatcccacttcgtccaaaccgtggccgtgggggatacagaggcagaggaggtcttggtttccgtggtggcagagggcgtggtggtggcagaggtggtaccttcactgcccctcgaggatttcgcggtggattcagaggaggtcgtgggggccgggagtttgcggattttgaatataggaaagacaacaaagttgctgcatagtctacaaacaagtctctgaaaataggtgaatttctagctcttcatggtcctgaacattgatttcagtctttgcaaagaatgaagaagtgaattcgctgtacatttgtcaccagcactgggtttttgttttttgtttgtttttccgcttaatttcaaagataaaatgcagttacttttgggggtggaaggctcatcttaaaacatgagcattaaatatatttggaatagcagaaggttaagtaatttcttatgtatagttaaactaaagcagtacttcagtgggacttaacaagtattttttcatcactgaaaggtttttttttttttatcactaaattgtatttggcaattgcaagttgcctgcagatagggccgtgatactgtgttttgagccacagaaggttgtgtgtgtgtgtgtgtgtgtgtgtgtgtgtgtgtgtgtgtgtatgtgtgtgtctttttcctcctttcttttggggaatcctgtaatatgaggtagcttatttcgtcaattaattagggtgctggatggtagagaattttgtcagtcaactatgtacacacagtaaatactgtttcttaggcaaaggtaacttttttatatagttgtaaaattccattatattccattgccaaagaaacattaagaactttgtatagctgtataaaaagcaactaattttttaaagaataaacattttaaagtcagcaaacatactgtgtccttgcagaagttgatgtgctgagcagcagccttatgggtgggtctttttttcttagttttccaggcttaacatttttgattttgttttttaatgtttggaacataaatgaagatttgatacattatttcattatctaaaaaggattaattattcatgctcattgtaagaacttcattttgtagcaaatggcatatcacaggatctgtccagataatcgatattttcagtatacaaatgtaaataatcacagatgagaatgtacttagctgtattttcaaataagtaatcttccccccttttgtaggactttaaaactaggcatcaatgaacctgtttttcctattatgcctggaatttagtcatgataccttgactcattccatcatatttcaagaggattcagagtgctagaaattattttggtagcctgtaacacacggcaacactggtccttgggcctatgatgacccacagatgactcagtatagagttcattgctaattataaattactagtgaatctttttgatattttaagctctagtgggaaaaatctggccacttttgtgtttttatgaaggccatggaataaaagggtccaaagatttaaatatttttatctaatattttgattgttttcttaactttctccttaaaacattcagtagtgataaagatatagaaactgcactgtaggagaattggaatatttaaggctggttgacattttttattttcattttatatcttttgtatagctctacaaggcagtgttttgtaatttggtttcattatgaagatccagtacttggcagccatagtttagacaatattgttcagtgctgtttgcttgcatgttaacaacaaaaccttttagaggacccacaaatcatgatattgaacacagttccgaggcattcagagcatcagagcaagtaccatggcaatacatgtgtagactgttggagatgtcccgggccaatttcaagaaagaaaactgtaaatactagttctacttgctctgaaattatgagtttatgcgttttcccagccctccgaatcactgactggggcgttttgtgccccagcaataactggcagcatggcatacctgcagtaccccttacaatattaaagcaaagtttttattctaaaacagaataaaactgttcaataaaaaatgctcgtcaaagttc

SEQ ID NO: 145 - DNA, 4170 bp, Homo sapiens
cgcgggtctgtggagagccgggtgcgagcggcggcagcacgaggggaaaagagctgagcggagaccaaagtcagccgggagacagtgggtctgtgagagaccgaatagaggggctggggccacgagcgccattgacaagcaatggggaagaaacagaaaaacaagagcgaagacagcaccaaggatgacattgatcttgatgccttggctgcagaaatagaaggagctggtgctgccaaagaacaggagcctcaaaagtcaaaagggaaaaagaaaaaagagaaaaaaaagcaggactttgatgaagatgatatcctgaaagaactggaagaattgtctttggaagctcaaggcatcaaagctgacagagaaactgttgcagtgaagccaacagaaaacaatgaagaggaattcacctcaaaagataaaaaaaagaaaggacagaagggcaaaaaacagagttttgatgataatgatagcgaagaattggaagataaagattcaaaatcaaaaaagactgcaaaaccgaaagtggaaatgtactctgggagtgatgatgatgatgattttaacaaacttcctaaaaaagctaaagggaaagctcaaaaatcaaataagaagtgggatgggtcagaggaggatgaggataacagtaaaaaaattaaagagcgttcaagaataaattcttctggtgaaagtggtgatgaatcagatgaatttttgcaatctagaaaaggacagaaaaaaaatcagaaaaacaagccaggtcctaacatagaaagtgggaatgaagatgatgacgcctccttcaaaattaagacagtggcccaaaagaaggcagaaaagaaggagcgcgagagaaaaaagcgagatgaagaaaaagcgaaactgcggaagctgaaagaaaaagaagagttagaaacaggtaaaaaggatcagagtaaacaaaaggaatctcaaaggaaatttgaagaagaaactgtaaaatccaaagtgactgttgatactggagtaattcctgcctctgaagagaaagcagagactcccacagctgcagaagatgacaatgaaggagacaaaaagaagaaagataagaagaaaaagaaaggagaaaaggaagaaaaagagaaagagaagaaaaaaggacctagcaaagccactgttaaagctatgcaagaagctctggctaagcttaaagaggaagaagaaagacagaagagagaagaggaagaacgtataaaacggcttgaagaattagaagccaagcgtaaagaagaggaacgattggaacaagaaaaaagagaaaggaaaaagcaaaaagaaaaagaaagaaaagaacgcttgaaaaaagaagggaaacttttaactaaatcccagagagaagccagagccagagccgaagctactcttaaactgctacaagctcagggtgttgaagtgccatcaaaagactctttgccaaagaagaggccaatttatgaagataaaaagaggaaaaaaataccacagcagctagaaagtaaagaagtgtctgaatcaatggaattatgtgctgctgtagaagttatggaacaaggagtaccagaaaaggaagagacaccacctcctgttgaaccagaagaagaagaagatactgaggatgctggattggatgattgggaagctatggccagtgatgaggagacagaaaaagtagaaggaaacacagttcatatagaagtaaaagaaaaccctgaagaggaggaggaggaggaagaagaggaagaagaagatgaagaaagtgaagaagaggaggaagaggagggagaaagtgaaggcagtgaaggtgatgaggaagatgaaaaggtgtcagatgagaaggattcagggaagacattagataaaaagccaagtaaagaaatgagctcagattctgaatatgactctgatgatgatcggactaaagaagaaagggcttatgacaaagcaaaacggaggattgagaaacggcgacttgaacatagtaaaaatgtaaacaccgaaaagctaagagcccctattatctgcgtacttgggcatgtggacacagggaagacaaaaattctagataagctccgtcacacacatgtacaagacggtgaagcaggtggtatcacacaacaaatttgggccaccaatgttcctcttgaagctattaatgaacagactaagatgattaaaaattttgatagagagaatgtacggattccaggaatgctaattattgatactcctgggcatgaatctttcagtaatctgagaaatagaggaagctctctttgtgacattgccattttagttgttgatattatgcatggtttggagccccagacaattgagtctatcaaccttctcaaatctaaaaaatgtcccttcattgttgcactcaataagattgataggttatatgattggaaaaagagtcctgactctgatgtggctgctactttaaagaagcagaaaaagaatacaaaagatgaatttgaggagcgagcaaaggctattattgtagaatttgcacagcagggtttgaatgctgctttgttttatgagaataaagatccccgcacttttgtgtctttggtacctacctctgcacatactggtgatggcatgggaagtctgatctaccttcttgtagagttaactcagaccatgttgagcaagagacttgcacactgtgaagagctgagagcacaggtgatggaggttaaagctctcccggggatgggcaccactatagatgtcattttgatcaatgggcgtttgaaggaaggagatacaatcattgttcctggagtagaagggcccattgtaactcagattcgaggcctcctgttacctcctcctatgaaggaattacgagtgaagaaccagtatgaaaagcataaagaagtagaagcagctcagggggtaaagattcttggaaaagacctggagaaaacattggctggtttacccctccttgtggcttataaagaagatgaaatccctgttcttaaagatgaattgatccatgagttaaagcagacactaaatgctatcaaattagaagaaaaaggagtctatgtccaggcatctacactgggttctttggaagctctactggaatttctgaaaacatcagaagtgccctatgcaggaattaacattggcccagtgcataaaaaagatgttatgaaggcttcagtgatgttggaacatgaccctcagtatgcagtaattttggccttcgatgtgagaattgaacgagatgcacaagaaatggctgatagtttaggagttagaatttttagtgcagaaattatttatcatttatttgatgcctttacaaaatatagacaagactacaagaaacagaaacaagaagaatttaagcacatagcagtatttccctgcaagataaaaatcctccctcagtacatttttaattctcgagatccgatagtgatgggggtgacggtggaagcaggtcaggtgaaacaggggacacccatgtgtgtcccaagcaaaaattttgttgacatcggaatagtaacaagtattgaaataaaccataaacaagtggatgttgcaaaaaaaggacaagaagtttgtgtaaaaatagaacctatccctggtgagtcacccaaaatgtttggaagacattttgaagctacagatattcttgttagtaagatcagccggcagtccattgatgcactcaaagactggttcagagatgaaatgcagaagagtgactggcagcttattgtggagctgaagaaagtatttgaaatcatctaattttttcacatggagcaggaactggagtaaatgcaatactgtgttgtaatatcccaacaaaaatcagacaaaaaatggaacagacgtatttggacactgatggacttaagtatggaaggaagaaaaataggtgtataaaatgttttccatgagaaaccaagaaacttacactggtttgacagtggtcagttacatgtccccacagttccaatgtgcctgttcactcacctctcccttccccaacccttctctacttggctgctgttttaaagtttgcccttccccaaatttggatttttattacagagtctaaagctctttcgattttatactgattaaatcagtactgcagtatttgattaacca

SEQ ID NO: 146 - DNA, 1758 bp, Homo sapiens
agcaagcggcctgtgcccagatcctgggagaaccccagccgagcccagcctagcccgagcccagcccgagcggagccggagccccaagcccgagccgcgcccagcccgagcagagccctccagccgctcaccccgcgtgccaccccagcgaccctcagccgctctctgcccttctctcggccccgcgcccgccctcgcggcccctctgcccaatgaaactggccgcgatgatcaagaagatgtgcccgagcgactcggagctgagtatcccggccaagaactgctatcgcatggtcatcctcggctcgtccaaggtgggcaagacggccatcgtgtcgcgcttcctcaccggccgcttcgaggacgcctacacgcctaccatcgaggacttccaccgcaagttctactccatccgcggcgaggtctaccagctcgacatcctcgacacgtccggcaaccacccgttccccgccatgcggcgcctctccatcctcacaggagacgttttcatcctggtgttcagtctggacaaccgcgactccttcgaggaggtgcagcggctcaggcagcagatcctcgacaccaagtcttgcctcaagaacaaaaccaaggagaacgtggacgtgcccctggtcatctgcggcaacaagggtgaccgcgacttctaccgcgaggtggaccagcgcgagatcgagcagctggtgggcgacgacccccagcgctgcgcctacttcgagatctcggccaagaagaacagcagcctggaccagatgttccgcgcgctcttcgccatggccaagctgcccagcgagatgagcccagacctgcaccgcaaggtctcggtgcagtactgcgacgtgctgcacaagaaggcgctgcggaacaagaagctgctgcgggccggcagcggcggcggcggcggcgacccgggcgacgcctttggcatcgtggcacccttcgcgcgccggcccagcgtacacagcgacctcatgtacatccgcgagaaggccagcgccggcagccaggccaaggacaaggagcgctgcgtcatcagctaggagccccgccgcgctggcgacacaacctaaggaggacctttttgttaagtcaaatccaacggcccggtgcgccccaggccgggagcgcgcgcggactggcgtctcccctcccggcgatccgcccccagcactggggaggcgccactgaaccgagaagggacggtcatctgctccggaaggaaagagaacgggccaagactgggactattccccacccccggtcccccattgaggcccgccacccccataactttgggagcgagggcccagccgagggtggatttatcttctcaaagacctaagagtgagcgcggggtgggggagggatgtgaagttatccagcctctgctaggcttcaagaaaccgtcatgcccgcttgagggtcaggacccacggggcattatcttgtctgtgattccgggttgctgtgacagccggtagagcctctgccctcccgaaactaagcgggggggcgtgggtcaaatcatagccaagtgacttgtttacatgtgagtgaaactgcacaaaggaacacaaaacaaaacttgcactttaacggtagttccggtgtcaacatggacacgaacaaaaccttacccaggtgtttatactgtgtgtgtgtgaggtctttaaagttattgctttatttggttttttaatatacaataaaataatttaaaatggaaaaaaaaaaaaaaaa

SEQ ID NO: 147 - DNA, 1765 bp, Homo sapiens
tcccacacccgacgctctggcccacacagacgctactctgtagcatctcaggttccctctggctgcactctggaggaccacactcgttttctttttggctgccagaggcccccgcatccaccgctgagctgggagaaagatggcggcagccgtgcgacaggatttggcccagctcatgaattcgagcggctctcataaagatctggctggcaagtatcgtcagatcctggaaaaagccattcagttatctggagcagaacaactagaagctttgaaagcttttgtggaagcaatggtaaatgagaatgtcagtctcgtgatctcgcggcagttgctgactgatttttgcacacatcttcctaacttgcctgatagcacagccaaagaaatctatcacttcaccttggaaaagatccagcctagagtcatttcatttgaggagcaggttgcttccataagacagcatcttgcatctatatatgagaaagaagaagattggagaaatgcagcccaagtgttggtgggaattcctttggaaacaggacaaaaacagtacaatgtagattataaactggagacttacttgaagattgctaggctatatctggaggatgatgatccagtccaggcagaggcttacataaatcgagcatcgttgcttcagaatgaatcaaccaatgaacaattacagatacattataaggtatgctatgcacgtgttcttgattatagaagaaaattcattgaagctgcacaaaggtacaatgagctctcttacaagacaatagtccacgaaagtgaaagactagaggccttaaaacatgctttgcactgtacgatcttagcatcagcagggcagcagcgttctcggatgctagctactctttttaaggatgaaaggtgccagcaacttgctgcctatgggatcctagagaaaatgtatctagataggatcatcagaggaaatcaacttcaagaatttgctgccatgctgatgcctcaccaaaaagcaactacagctgatggttccagcatcttggacagagctgttattgaacacaatttgttgtctgcaagcaaattatataataatattaccttcgaagaacttggagctcttttagagatccctgcagctaaggcggaaaagatagcatctcaaatgataaccgaaggacgtatgaatggatttattgaccagattgatggaatagttcattttgaaacacgagaagccctgccaacgtgggataagcagatccaatcactttgtttccaagtgaataaccttttggagaaaattagtcaaacagcaccagaatggacagcacaagccatggaagcccagatggctcagtgaatccttgcagaacttctgtgcacatgacatctttttccatgttgtgcagatcagtttcactatctccaaagcatttgcatcatgaccttatacatttcaatcccttttatgctggattccgtttaaagaagacattattagagcaggaagtacaagcatttaaaatatgtagttcccatatatttcagggtctctgtgtattaagctaactcagatgttttgaaagctttttctttaaacagaggtgaaatatctgtggctaaaaagtttgagatttgtgataactttgtagtcatgtaaaacttaagtgcttcatgcctctccaaatgtggttattctaataaatggagaaatgagccaaataaaagtagtactttgtttttagttaaaaaaaaaaaaaaaaaa

SEQ ID NO: 148 - DNA, 1717 bp, Homo sapiens
ccggggcggatcggaagttgctttgttttgcttcgagatggctgcggggatgtatttggaacattatctggacagtattgaaaaccttccctttgaattacagagaaactttcagctcatgagggacctagaccaaagaacagaggacctgaaggctgaaattgacaagttggccactgagtatatgagtagtgcccgcagcctgagctccgaggaaaaattggcccttctcaaacagatccaggaagcctatggcaagtgcaaggaatttggtgacgacaaggtgcagcttgccatgcagacctatgagatggtggacaaacacattcggcggctggacacagacctggcccgttttgaggctgatctcaaggagaaacagattgagtcaagtgactatgacagctcttccagcaaaggcaaaaagagccggactcaaaaggagaagaaagctgctcgtgctcgttccaaagggaaaaactcggatgaagaagcccccaagactgcccagaagaagttaaagctcgtgcgcacaagtcctgagtatgggatgccctcagtgacctttggcagtgtccacccctctgatgtgttggatatgcctgtggatcccaacgaacccacctattgcctttgtcaccaggtctcctatggagagatgattggctgtgacaaccctgattgttccattgagtggttccattttgcctgtgtggggctgacaaccaagcctcgggggaaatggttttgcccacgctgctcccaagaacggaagaagaaatagataagggccttggattccaacacagtttcttccacatcccctgacttgggctagtgggcagaggaatgcctgtgctggggccaggggttcagggaggagtggatggcacagtgctgtcatcccttctcctcccctctccccactcccggtgctgaggctgcatcagaccctggtagggaggggtgccgcagccactaacggtatgtgctctccttcagccctctcccttcggagggacgtggtcttgcccactgtccttttgcctccatgctgaggtcggtgctgtatttcagagggagggtccttttcattctccttgctttgtatttaaggactggggcatagcatgggggcagtcccccagacctcttcattccccctcctgtggtgagggctaggtgtgatcaacacttttcttctccattcccttcctgcttttttcatggtgggggatccaccaggtcatctaggctctggccctagttgaaggggcaccccttcctctgtgccaagaggattcatcctgggagagggggcaaggtggaatgcagataactcacatgtaaaaggaacttgggtaggtaaataaaagctatacatgttggcctgctgtgtttattgtagagacactgttttagtaaacatgctgagcattcattttgcgtcctctgggttggatgcaatgtgagaggatggcatgccagaattaggacacgacatgaaaccagagtggtgcctctgtccgagaacttgtaagttctcaacttgggaaagacagaggtgctggagggtaggcctcagaccagggggtctccaaaactttgtaaatcatgcatcttttctccataaaacatctttcacttaatttccaataaatgatgtatttgtgctatacatacgtactgctatactataaaaaaaaaaaaaaaaaaa

SEQ ID NO: 149 - DNA, 4984 bp, Homo sapiens
ggttatttgtggttcgctttgatcccgagggggaacctgaaactctcacattcctggcatagcagccgcctccggcgcgggccgaccctggggctgcgcgctggggcgcgaacagccagagcgtcggcgccacggccgagaacacatcttcgccgccgagctgagctgggccgagccggaggttgtggtgtctgactgcgctgggcaccctcgggccgcagcggtgctctggggccaggtgccaccggccattgtccaggcagctgtgtgcaagccaaagaagcatgaggacactggaagactcctcggggacagtcctgcaccgcctcatccaggagcagctgcgctacggcaacctgactgagacgcgcacgctgctagccatccagcagcaggccctgaggggtggggctggaactgggggtacagggagcccccaggcctccctggagatcctggccccagaggacagtcaggtgctgcagcaggccaccaggcaggagccccagggccaggagcaccagggcggtgagaaccacctggcagagaacaccctctaccggctatgcccacagcccagcaagggagaggagctgcccacctatgaggaggccaaagcccactcgcagtactatgcggcccagcaggcagggacccggccacatgcgggggaccgagatccccgtggggccccgggaggcagtcggaggcaggacgaggccctgcgggagctgaggcatgggcacgtgcgctcgttgagtgaacggctccttcagttgtccctggagaggaacggcgcccgggcccccagccacatgagctcctcccacagcttcccacagctggcccgcaaccagcagggccccccactgaggggcccccctgctgagggcccagagtcccgaggacccccacctcagtaccctcatgttgtactagctcatgagaccaccactgctgtcactgacccacggtaccgtgcccgcggcagcccgcacttccagcatgctgaagtcaggatcctgcaggcccaggtgcctcctgtgttcctccaacagcagcagcagtaccagtacctgcagcaatctcaggagcacccccctcccccacatccagctgctctcggccatggccccctgagctccctcagtccacctgctgtggaggggccagtgagtgcccaggcctcctcagccacctcgggcagtgcccacctggcccagatggaggccgtgctgagggagaatgccaggctgcagagagacaatgagcggctgcagagggagctggagagctctgcggagaaggctggccgcattgagaagctggaaagcgaaatccagcggctctctgaggcccatgagagcctgaccagagcctcctccaagcgtgaggccctggagaagaccatgcggaacaagatggacagtgaaatgaggaggctgcaagacttcaaccgggatcttagagagagattggaatctgcaaatcgccgcctggcaagcaagacacaggaggcccaggccggcagtcaggacatggtggccaagctgcttgctcagagctacgaacagcagcaggagcaagagaagctggagcgagagatggcactgctgcgcggcgccatcgaggaccagcggcggcgtgccgagctgctggagcaggctctgggcaatgcgcagggccgggcagctcgagccgaagaggagctgcgcaagaagcaggcctatgtggagaaagtggagcggctgcagcaggcgctcgggcagctgcaggcagcctgtgagaagcgggagcagctggagctgcgtctgcggactcgcctggagcaggaactcaaggccctgcgtgcacagcagagacaggcaggtgccccaggtggtagcagtggcagtggtgggtctccagagctcagcgccctgcgactgtcagaacaactgcgagagaaggaggagcagatcctggcgctggaggccgacatgaccaagtgggagcagaagtatttggaggaacgtgccatgaggcagtttgccatggatgcggctgccacggctgctgctcagcgtgacaccactctcatccgacattccccccagccctcacccagcagcagcttcaatgagggtctgctcactggtggccacaggcatcaggagatggaaagcaggttaaaggtgctccatgcccagatcctggagaaggatgcagtgatcaaggtccttcagcagcgctccaggagagaccctggcaaggccatccagggctccctgcggcctgccaagtcggtgccatctgttttcgcggctgcggcagcaggaacccagggctggcaagggctctcttctagtgagcgacaaacagcagacgcccctgctcggctgactacagcagacagagcacccacagaggagccagtggtcacagctccccctgctgcccatgccaaacacgggagcagagatgggagcacccagactgagggccccccagacagcacctccacctgcctgccaccggagcctgacagccttctggggtgcagcagtagccagagagcagcctctctggactctgtagctacatccagagtccaggacttgtcagacatggtggagatactgatctgaaggaggtggtgcttcaggactctgagccattctctcccctcctctgccctgtgccactctcagccatttcagcagccccgtcaaccgctgctccgtccctttccccagccagacactcattcccattgaccatctggtcccaggagctcaggaggaggaccccaggggagaggagagctgtgagagcaccggcacccccagaagactctgcttcttagcccacattcctccgggccttatggagaatgaggattcagccttgacttcttgcccaaggcctgctactggggtagcaactgacagctcagaaaggagctgagctccctctgccctgccagttgtcagtcaggcagggagggagtggctgtgttggtttggggaactaatttccacggacggctgcccgtggacaccaggtggactggttcactaatcaagtcagccatattgttctctggctaagtttggttccagccaacgtcatctgctcttcagttcctcactgccttcttgggatactaagacttgaattttttggggactattaagggtgttagtcttggagaagacacagcctcaccttctcacttgctgtgggtgaggggccatttaagtggactgggagacagtgcgcagtttgtatataattccctttcttgtggaacagaagactgaggcctgcaggttccgatgtgtctccatgggctgtgctcccctcttcctactgtcagtttctgaaacttctgactggcctcccagttatgcctcctcctcaagttcctggcccgtggatgttaaagctgctcgattcccaggatctcggctgccttttcctctatcttgagccctataaatgcccacgggacccccaccaccagcctcttgaagtggctccacagctcctgtccctggaacatcctgtcagtttggtcataaaccctgagccagatgaaatgagccaccgtgaacagacatctgccatgcccccaggtgggcttcggtggccctacccggtaccagttctttctgagaaactggagatgtcttgttagcataagtgtcttcattcccacctggagggtttgggagaggagcaaagcagttgaaaactagttaatgagctacaagagtcaaatagtcctctgaatggagcccccatcacaaaacagtgcccaggaggctggctcctcaagctacccatgcccagcgccctaaagcagcaccagatgctttggaattggggtgaaacacccacatggcagcctgctagcagcagtgactttgacttctggtcttaaagagtccctcacttcagccccaggagctattggtgggttttagcagttttgtctttaccgtttttagttctccttgattctttgttttcttcctttatcgtttttaggtttggtatgtgttgttttatttccatggttcctcaagtttcctttttaaacatttgcatttgctggacaattgcaattttttttaaaaaattcccctacccctgtttaaagctgaaaaatacatttggttcatgtgcattgtttacaaagcaaaaagaaaaaagaggaaaaaaaggcaaaaaatattgtgaaagaaaaaaaacaacttaatatattttggattaatatttggtatttcttttaaagtattttttgtgctgtgaacattttctgccaaagaccatgatgtgtgtctgtatgtttaagttatcgtaaatatttaaaatgtaaacatggctgttttgttatgccaccctgtaccaggattgctgccgcattccactgggtataacagtattttaattaaaaaaaaataattaaaagtgatgtctttgcacaggtgagactttgcactgagggaagggaaagggtgaggattttggggggccacccaagtcatagtccaatctcttcaaggacccaagatagaatttaggaattttgtgaagctgcattaaggatagagttggaatgaggatgtggctggcatttttcccctttcatagataacatttcttgaaggctgggaggggaaggagggcctggcagatggcagcctcccgaggtagggctgtgttctaatcagctttgttcggccacacgctgtggttatccacagtgggagtgggtgtccaaagatggctttatccttcccccactccttttcccactcccacctagcacataaagttttgtccgaaaccatccagaaggccaggcaccatgcagaggacattcaagaatgtgcatgttcttagccaccgcctccctcctttgctgtgacatcaccactctttcctgatgctcaggaaagcatattgctccaattcaaaattaaagaaagccattctc

SEQ ID NO: 150 - DNA, 2667 bp, Homo sapiens
gaattattttgcaggagtctacacccaggcggtggctatacttattaaagttggcgggagctgagcgatcagtcggtcctgggctggctgtggtgtagggcgttgcaggcagcgctcacctcctcaggccggcagaatgcgggtggctgtggctggctgctgccacggcgagctggataagatctatgagacgctggcgctggcagagcggcgcggcccggggcctgtcgacctcttgctgtgctgcggcgacttccaggcggtgcgcaacgaggcggatctacgctgcatggccgtgccgcccaagtatcgtcacatgcaaaccttctacaggtattactctggagagaaaaaggctccagttctcacgctcttcattgggggaaaccatgaagcctcaaatcatttgcaagagttaccctatggtggctgggtggcaccaaacatttattatttaggtttggctggtgtggtaaaataccgaggtgtaaggatcggtggaatctctggtatctttaaatctcatgactatcgaaaaggtcattttgagtgccccccttataattcatctacaatcaggagtatatatcatgtgagaaatattgaagtctataaattaaaacagctgaagcagcctatagatatattcttgtctcatgattggccaagaagtatatatcattatggaaataagaagcaacttcttaagactaaatcttttttccgacaagaagtggaaaataacacattaggaagtccagctgcctcagagcttttagagcatctcaaacctacttattggttttctgcccaccttcatgtgaagtttgccgccttgatgcagcatcaggcaaaggataaaggacagacagccagagcaaccaaatttttagccttggacaaatgcttaccacatagagattttcttcagatattagagatagaacatgaccccagtgctcctgattacttggaatatgatattgaatggctcactattctcagggctacggatgatcttattaatgtgactgggcgcctgtggaatatgccagaaaataatggcctgcatgcaaggtgggattatagtgcaacagaagaaggtatgaaagaagtattggaaaaattgaatcatgatctcaaggttccatgtaactttagtgtaacagctgcttgttatgatcctagcaagccacagacacaaatgcagctgattcataggatcaatcctcagactactgaattttgtgcccaacttggcatcatagacatcaatgttaggcttcagaagtccaaggaagaacatcatgtgtgtggtgaatatgaagaacaggatgatgtggagagtaatgactctggagaagaccagagtgaatataatacagacacatctgctctgtcttctattaatccagatgaaataatgttagatgaagaagaagatgaagatagtattgtaagtgcacatagtggcatgaatacaccatcggtagaaccttctgatcaagcttctgagttttctgcaagtttctctgatgtcaggatcttgccaggctctatgattgtatcttctgatgatacggtggattccacaattgatagagaggggaaacctggtgggactgtggagtcagggaatggagaggacttaaccaaggtgccattgaagaggctgagtgatgaacatgaacctgaacaaagaaagaaaattaagaggaggaatcaagccatttacgctgcagtggatgatgatgatgatgatgcagcttaagatgatttacttgttttgtttttgtgtttgttttgcttttttgagatggagtttcactcttgtcacctagactggagtgcaatggcgtgatctcggctcaccgcaacctccgcctcccaggttcaagcaattctcctgcctcagcctcccaagtaggtgggactacaggtgcccgccaccacacccggctaatttttgcatttttagtaatgacagggtttcaccatgttggccaggctggtctccaactcctgacctcaggcgatccacctgtcttggccttctaaagtgctgggattacaggcgtgagccactgtgcctggccgacaatttacttgtcttagtattatatgtagatatgtgattttttgagactgtatttttagagctgaatttttgactaaagacttaactttataataatgaagatacattagagaattttagttagatattgactttatctttaggcttttgtatgtttcagatgcaaacatattaaagtttcatatatttacttgactgggtatctttttttttgaagacatacattattcacttccatttttacaataaacacttacttaacatctactctgtgccaagcactctgctataatatgggaccataaagatgagtaagacaaggatttttgcctccaaggacttgttatcactgtaaacattttgatgtatacaatatggctatattatattttgttttataaaatcaagtctttgtatatattatgatgtatgctttcttttcatttattataaatatttttcctgatcagcttttaatatctgtcaaataaaaattgaaattgaagatggtatataagatttcaggaaataaactactctgaatactaaacaaaaaaaaaaaaaaaaaa

SEQ ID NO: 151 - DNA, 3084 bp, Homo sapiens
aagatctaaaaacggacatctccaccgtgggtggctcctttttctttttctttttttcccacccttcaggaagtggacgtttcgttatcttctgatccttgcaccttcttttggggaaacggggcccttctgcccagatcccctctcttttctcggaaaacaaactactaagtcggcatccggggtaactacagtggagagggtttccgcggagacgcgccgccggaccctcctctgcactttggggaggcgtgctccctccagaaccggcgttctccgcgcgcaaatcccggcgacgcggggtcgcggggtggccgccggggcagcctcgtctagcgcgcgccgcgcagacgcccccggagtcgccagctaccgcagccctcgccgcccagtgcccttcggcctcggggcgggcgcctgcgtcggtctccgcgaagcgggaaagcgcggcggccgccgggattcgggcgccgcggcagctgctccggctgccggccggcggccccgcgctcgcccgccccgcttccgcccgctgtcctgctgcacgaacccttccaactctcctttcctcccccacccttgagttacccctctgtctttcctgctgttgcgcgggtgctcccacagcggagcggagattacagagccgccgggatgccccaactctccggaggaggtggcggcggcgggggggacccggaactctgcgccacggacgagatgatccccttcaaggacgagggcgatcctcagaaggaaaagatcttcgccgagatcagtcatcccgaagaggaaggcgatttagctgacatcaagtcttccttggtgaacgagtctgaaatcatcccggccagcaacggacacgaggtggccagacaagcacaaacctctcaggagccctaccacgacaaggccagagaacaccccgatgacggaaagcatccagatggaggcctctacaacaagggaccctcctactcgagttattccgggtacataatgatgccaaatatgaataacgacccatacatgtcaaatggatctctttctccacccatcccgagaacatcaaataaagtgcccgtggtgcagccatcccatgcggtccatcctctcacccccctcatcacttacagtgacgagcacttttctccaggatcacacccgtcacacatcccatcagatgtcaactccaaacaaggcatgtccagacatcctccagctcctgatatccctactttttatcccttgtctccgggtggtgttggacagatcaccccacctcttggctggcaaggtcagcctgtatatcccatcacgggtggattcaggcaaccctacccatcctcactgtcagtcgacacttccatgtccaggttttcccatcatatgattcccggtcctcctggtccccacacaactggcatccctcatccagctattgtaacacctcaggtcaaacaggaacatccccacactgacagtgacctaatgcacgtgaagcctcagcatgaacagagaaaggagcaggagccaaaaagacctcacattaagaagcctctgaatgcttttatgttatacatgaaagaaatgagagcgaatgtcgttgctgagtgtactctaaaagaaagtgcagctatcaaccagattcttggcagaaggtggcatgccctctcccgtgaagagcaggctaaatattatgaattagcacggaaagaaagacagctacatatgcagctttatccaggctggtctgcaagagacaattatggtaagaaaaagaagaggaagagagagaaactacaggaatctgcatcaggtacaggtccaagaatgacagctgcctacatctgaaacatggtggaaaacgaagctcattcccaacgtgcaaagccaaggcagcgaccccaggacctcttctggagatggaagcttgttgaaaacccagactgtctccacggcctgcccagtcgacgccaaaggaacactgacatcaattttaccctgaggtcactgctagagacgctgatccataaagacaatcactgccaacccctctttcgtctactgcaagagccaagttccaaaataaagcataaaaaggttttttaaaaggaaatgtaaaagcacatgagaatgctagcaggctgtggggcagctgagcagcttttctccccccatatctgcgtgcacttcccagagcatcttgcatccaaacctgtaacctttcggcaaggacggtaacttggctgcatttgcctgtcatgcgcaactggagccagcaaccagctatccatcagcaccccagtggaggagttcatggaagagttccctctttgtttctgcttcatttttctttcttttcttttctcctaaagcttttatttaacagtgcaaaaggatcgtttttttttgcttttttaaacttgaatttttttaatttacactttttagttttaattttcttgtatattttgctagctatgagcttttaaataaaattgaaagttctggaaaagtttgaaataatgacataaaaagaagccttctttttctgagacagcttgtctggtaagtggcttctctgtgaattgcctgtaacacatagtggcttctccgcccttgtaaggtgttcagtagagctaaataaatgtaatagccaaaccccactctgttggtagcaattggcagccctatttcagtttattttttcttctgttttcttcttttctttttttaaacagtaaaccttaacagatgcgttcagcagactggtttgcagtgaattttcatttctttccttatcacccccttgttgtaaaaagcccagcacttgaattgttattactttaaatgttctgtatttgtatctgtttttattagccaattagtgggattttatgccagttgttaaaatgagcattgatgtacccattttttaaaaaagcaagcacagcctttgcccaaaactgtcatcctaacgtttgtcattccagtttgagttaatgtgctgagcatttttttaaaagaagctttgtaataaaacatttttaaaaattgtcatttaaaaaaaaaaaaaaaaaa

SEQ ID NO: 152 - DNA, 1852 bp, Homo sapiens
ccgcgctgtccgccgccgctgcctgagtcgactctgcgccgcccgccgcgatggaggccgccgcccagttcttcgtcgagagcccggacgtggtctacggccccgaggccatcgaggcgcaatacgagtaccggacgacgcgcgtcagccgcgagggtggcgttctcaaggtgcaccccacgtccacgcgcttcaccttccggaccgcccggcaggtgccccggctcggggtcatgcttgtcggctggggcgggaacaacggctccacactcaccgccgcggtgctggccaatcgactgcgtttgtcctggcccacgcgcagcggccgcaaggaggccaactactacggctcgctgactcaggcgggcaccgtgagcctgggcctggacgccgagggccaggaggtgttcgtacccttcagcgcggtgctgcccatggtggcgcccaacgacctcgtgttcgatggctgggacatctcgtcgctgaacctggccgaggcgatgcggcgcgcgaaggtgctggactgggggctgcaggagcaactgtggccgcacatggaggccctgcggccccggccttctgtttacatccccgaattcatcgcggccaaccagagcgcgcgcgcggacaacctcatcccaggctcgcgtgcgcagcagctggagcagatccgcagggacatccgagacttccggtctagcgcggggctggacaaagtcatagtgctgtggacggcgaacacggagcgcttctgtgaggtgattccaggcctcaacgacacagccgagaacctgctgcgcaccattgagctcggtctggaggtgtcgccctccacgctcttcgccgtggccagcatcctggagggctgtgccttcctcaatgggtctccgcagaacaccctggtgcccggagctcttgagctcgcgtggcagcaccgggtttttgtgggcggagatgacttcaagtcaggccagaccaaagtcaagtccgtgcttgtggacttcctcattggctccggcctcaagaccatgtccatcgtgagttacaaccacctgggcaacaacgatggggagaacctatcggcgccattgcagttccgctctaaggaggtgtccaagagcaacgtggtggacgacatggtgcagagcaacccagtgctctatacgcccggcgaagagcctgaccactgcgtggtcatcaagtatgtgccgtacgtgggtgacagcaagcgcgcgctggatgagtatacctcggagctgatgctgggcggaaccaacacactggtgctgcacaacacgtgtgaggactcgctgctggccgcacccatcatgctggacctagcgctgctgaccgagctgtgccagcgcgtgagcttctgcactgacatggaccccgagccgcagaccttccaccccgtgctgtccctgctcagcttcctcttcaaggcgccactagtgccgcccggcagcccggtggtcaatgcgcttttccgccagcgcagctgcatcgagaacatcctcagggcctgcgtggggctcccgccacagaaccacatgctcctggaacacaaaatggagcgcccagggcccagcctcaagcgagttggacccgtggctgccacctaccctatgttgaacaagaaaggaccggtacccgctgccaccaatggctgcaccggtgatgccaatgggcatctgcaagaggagcccccaatgcccaccacctgaggccccggtcacacagtttctcggctcttcctccccgctgccccccacgaccctaccttgaaggcccccacaaataaaggcgctgccactcagccctcaaaaaaaaaaaaaaaaaaaaaaaaaaa

SEQ ID NO: 153 - DNA, 1830 bp, Homo sapiens
aagcttacgaggaattcttggatgacatccctcagcatgtctgagcgactgctgagggagaaaatgatgcccaggttggtccccggcccaccgcagagaggcctgcgctgcacacgcgcagaccgagcatccgcgtcaagaggcgaagagagcgcgcgctccccacgtcctgcgctcctggctgccgggcattcgtctcagccgtgactctcgccaggccggggctggcgcgcccacgtctgaagagcgatgccccgggagatcatcaccctgcagctgggccagtgcggcaaccagattgggttcgagttctggaaacagctgtgcgccgagcatggtatcagccccgagggcatcgtggaggagttcgccaccgagggcactgaccgcaaggacgtctttttctaccaggcagacgatgagcactacatcccccgggccgtgctgctggacttggaaccccgggtgatccactccatcctcaactccccctatgccaagctctacaacccagagaacatctacctgtcggaacatggaggaggagctggcaacaactgggccagcggattctcccagggtgagaaaattcatgaagacatctttgacatcatagaccgagaagcagatggaagtgacagtttggagggcttcgtgctgtgtcactccatcgctgggggtacgggttctggcctgggctcctacctcctggagcgactgaatgacaggtaccccaagaagctagtgcagacttattcagtgtttccctaccaggacgagatgagcgacgtagtggttcagccctacaattcactcctgacactcaagaggctgacgcagaacgcagattgtgtggtggtgctggacaacacagccctgaaccggattgccacagaccgcctgcacatccagaacccgtccttctcccagatcaaccagctggtgtccaccatcatgtcggccagcaccaccaccctgcgctaccccggctacatgaacaatgacctcatcggcctcatcgcctcgctcattcccaccccacggctccactttctcatgaccggctacaccccgctcactacagaccagtcagtggccagcgtgaggaagaccacggtcctggatgtcatgaggcggctgctgcagcccaagaacgtgatggtgtccacaggccgagaccgccagaccaaccactgctacatcgccatcctcaacatcatccagggagaggtggaccccacccaggtccacaagagcctgcagaggatccgggaacggaagttggccaacttcatcccgtggggccccgccagcatccaggtggccctgtcgaggaagtctccctacctgccctcggcccaccgggtcagcgggctcatgatggccaaccacaccagcatctcctcgctctttgaaagttcctgccagcagtttgacaagctgcggaagcgggatgccttcctcgagcagttccgtaaggaggacatgttcaaggacaactttgatgagatggacaggtctagggaggttgttcaggagctcattgatgagtaccatgcggccacccagccagactacatttcctggggcacccaggagcagtgatttccctccccactactccttctccttctagatggtaaccacagcctcgaccatgcctgctccctctgacccagcttcacctcatggacaacccttcttggttcatctccagcccgtgagctggtcctgcttcctcccttccatgccctaacttttaatatgcttgttcagctctaataaagtaataaagcttggttgtcagtataaaaaaaaaaaaaaaaaaaa

SEQ ID NO: 154 - DNA, 5327 bp, Homo sapiens
actttcggtcctgggggagctaggccggcggcagtggtggtggcggcggcgcaagggtgagggcggccccagaaccccaggtaggtagagcaagaagatggtgtttctgcccctcaaatggtcccttgcaatcatgtcatttctactttcctcactgttggctctcttaactgtgtccactccttcatggtgtcagagcactgaagcatctccaaaacgtagtgatgggacaccatttccttggaataaaatacgacttcctgagtacgtcatcccagttcattatgatctcttgatccatgcaaaccttaccacgctgaccttctggggaaccacgaaagtagaaatcacagccagtcagcccaccagcaccatcatcctgcatagtcaccacctgcagatatctagggccaccctcaggaagggagctggagagaggctatcggaagaacccctgcaggtcctggaacacccccctcaggagcaaattgcactgctggctcccgagcccctccttgtcgggctcccgtacacagttgtcattcactatgctggcaatctttcggagactttccacggattttacaaaagcacctacagaaccaaggaaggggaactgaggatactagcatcaacacaatttgaacccactgcagctagaatggcctttccctgctttgatgaacctgccttcaaagcaagtttctcaatcaaaattagaagagagccaaggcacctagccatctccaatatgccattggtgaaatctgtgactgttgctgaaggactcatagaagaccattttgatgtcactgtgaagatgagcacctatctggtggccttcatcatttcagattttgagtctgtcagcaagataaccaagagtggagtcaaggtttctgtttatgctgtgccagacaagataaatcaagcagattatgcactggatgctgcggtgactcttctagaattttatgaggattatttcagcataccgtatcccctacccaaacaagatcttgctgctattcccgactttcagtctggtgctatggaaaactggggactgacaacatatagagaatctgctctgttgtttgatgcagaaaagtcttctgcatcaagtaagcttggcatcacagtgactgtggcccatgaactggcccaccagtggtttgggaacctggtcactatggaatggtggaatgatctttggctaaatgaaggatttgccaaatttatggagtttgtgtctgtcagtgtgacccatcctgaactgaaagttggagattatttctttggcaaatgttttgacgcaatggaggtagatgctttaaattcctcacaccctgtgtctacacctgtggaaaatcctgctcagatccgggagatgtttgatgatgtttcttatgataagggagcttgtattctgaatatgctaagggagtatcttagcgctgacgcatttaaaagtggtattgtacagtatctccagaagcatagctataaaaatacaaaaaacgaggacctgtgggatagtatggcaagtatttgccctacagatggtgtaaaagggatggatggcttttgctctagaagtcaacattcatcttcatcctcacattggcatcaggaaggggtggatgtgaaaaccatgatgaacacttggacactgcagaggggttttcccctaataaccatcacagtgagggggaggaatgtacacatgaagcaagagcactacatgaagggctctgacggcgccccggacactgggtacctgtggcatgttccattgacattcatcaccagcaaatccaacatggtccatcgatttttgctaaaaacaaaaacagatgtgctcatcctcccagaagaggtggaatggatcaaatttaatgtgggcatgaatggctattacattgtgcattacgaggatgatggatgggactctttgactggccttttaaaaggaacacacacagcagtcagcagtaatgatcgggcaagtctcattaacaatgcatttcagctcgtcagcattgggaagctgtccattgaaaaggccttggatttatccctgtacttgaaacatgaaactgaaattatgcccgtgtttcaaggtttgaatgagctgattcctatgtataagttaatggagaaaagagatatgaatgaagtggaaactcaattcaaggccttcctcatcaggctgctaagggacctcattgataagcagacatggacagacgagggctcagtctcagagcaaatgctgcggagtgaactactactcctcgcctgtgtgcacaactatcagccgtgcgtacagagggcagaaggctatttcagaaagtggaaggaatccaatggaaacttgagcctgcctgtcgacgtgaccttggcagtgtttgctgtgggggcccagagcacagaaggctgggattttctttatagtaaatatcagttttctttgtccagtactgagaaaagccaaattgaatttgccctctgcagaacccaaaataaggaaaagcttcaatggctactagatgaaagctttaagggagataaaataaaaactcaggagtttccacaaattcttacactcattggcaggaacccagtaggatacccactggcctggcaatttctgaggaaaaactggaacaaacttgtacaaaagtttgaacttggctcatcttccatagcccacatggtaatgggtacaacaaatcaattctccacaagaacacggcttgaagaggtaaaaggattcttcagctctttgaaagaaaatggttctcagctccgttgtgtccaacagacaattgaaaccattgaagaaaacatcggttggatggataagaattttgataaaatcagagtgtggctgcaaagtgaaaagcttgaacatgatcctgaagctgacgcaacaggatgaaaatccatcagaatctcagactacagcactaaatatgctttgatgctacatcaaacggaatggaagcatagctgacttcgctaaagttacttcatctccatctagcaaatgaggcactgttctcaaccaaaggagatggggatctggtttagggcaatccctttataatttgatgtgctgtggtctccttggtaatgtataatttggtattgcacaggtgattagtcaaggaagtctggaaaagctttggtcccacagccttgcctcacagcatgtaaataattaaaacaatattgatgctgaggttcttctactgctagtatgaaagtgacaaatttttactggtgtgaattgggaagaaaacaatgctattccatgacgtttgtaaaatgtttgtaaaagctcaaacatgacgattccataaaataaacttgaggttaaataatgggtagtaaattatagaatgtataagaaaaaatataaaggagaaaatcaattatcaggaaagctaaagaacttttcaaatctagtaatttgaatatagacacaatgcactttattgcactttcaattcttataaagcaacaataatattaaggtccttgactatgtgtacaatgttttcacatatatagtttcatttaatcatttcaaagttaatctctgccatctcgctaaatcatcagtctcggctcttctgaaatagaaggtgcctgatcttcctaataattctgcctattttcatttgctttaaacaggcgccctattttctttctagttgtggctgcgcaaaaacatttatctcccaaataagatgtgctgcttaccgaggtatcacggggtggggctccagcttgggtcgttgaagctggggtttgggaaaccacttcagagatggcagcagcaagtttagcatcttcaaatttcttttattgaaaaaaattttattagtaacatgttgtatataaaattatgagcacaatgccatcacttaactataactcttaaagatagcttaatgactgtttattctcttgaccaaatagactcataataacatataattttaaaagaaatttaaattctttcttctctattgtattattttatacaatttgctatttctatttccttctcatattgattattctaaatactatgcaataatataacttagagttccacggtttgtttacacatttcctgttgtacatttaggttattcaaagttttcagctcttttaaaattgctctgaataagttctagtgagtgagttatggtgctggctatattttgctaaactgccctctcaaatgttgctaggaattcatactgcgaaaagcaatgaataagcatgcctgttttcccatggccttgcttgccagaatttgacttttattatgataatcagtgtaaaatgatatactactattgcttgtatattgtggtatacggtgtcaggtttcagggttttttttcaacgttaaatattctagaaactttctgaaataatttctgtttaaaaatattgaatatttgcttcatttcaaatactcccttttgacaaaaaaacttaggtataactgttgatgaaaaaccagaaaaaagtccagaactctttggtgactccaactatggatagcttattttgaaaaaggagaattgcaaattttaccaaaagatggagaaaagcacattaaaaagataccaacattcagaaattcatttcagcatgttattattggaaattatttaaactaatttagataactataagatacttattgtccatttataccctgtaaagccgttttagaatgtaatattttaggtaatccaaaatgtactaaattaaattcatttttagttatgagaaatctttgcttatatgacaaatgaaaagaataacaagttgtcaaatgaaaagaatgacattgaaacatttgtattgtctcttcttaaactatcttattgacttattatttaagccttttaatactaagtatgaaacaacctatggtctggaaatttgtatcgcaaagctatatgtgcatatgttatttaattcatctaacgctacacaaaagcataaaataatgatttttcactctctttaaaaatactaaatcatttatgtccatttctcaattttttcattgatctatgctttgagtttgctttctcaacattattgtattttccacttattattactgtataacatatgctagtgtttagttggattaatcttacctaaaagtactgaaaaatgctttttagtactttttcatattttatacatttattttccgaatgtatcattgaataattttattgagttataaaagtatcttattgctatttaataaaaaattaacacat

SEQ ID NO: 155 - DNA, 1718 bp, Homo sapiens
gcggaagcggaagagcaggtctccaggggagcgatggcagccgggggtctgagccgctccgagcgcaaagcggcggagcgggtccggaggttgcgggaggagcagcagagggagcgcctccgccaggtgtcgcgcatcctgaggaaggcggcggcggagcgcagcgccgaggagggccggctgctggccgagagcgcggacctggtaacggagctgcagggccggagccggcggcgcgagggcctgaagcggcggcaggaggaggtgtgcgacgacccggaggagctgcgggggaaggtccgggagctggccagcgccgtccggaacgccaaatacttggtcgtctacacaggcgcgggaatcagcacggcagcgtctatcccagactaccggggccctaatggagtgtggacactgcttcagaaagggagaagcgttagtgctgccgacctgagcgaggccgagccaaccctcacccacatgagcatcacccgtctgcatgagcagaagctggtgcagcatgtggtgtctcagaactgtgacgggctccacctgaggagtgggctgccgcgcacggccatctccgagctccacgggaacatgtacattgaagtctgtacctcctgcgttcccaacagggagtacgtgcgggtgttcgatgtgacggagcgcactgccctccacagacaccagacaggccggacctgccacaagtgtgggacccagctgcgggacaccattgtgcactttggggagagggggacgttggggcagcctctgaactgggaagcggcgaccgaggctgccagcagagcagacaccatcctgtgtctagggtccagcctgaaggttctaaagaagtacccacgcctctggtgcatgaccaagccccctagccggcggccgaagctttacatcgtgaacctgcagtggaccccgaaggatgactgggctgccctgaagctacatgggaagtgtgatgacgtcatgcggctcctcatggccgagctgggcttggagatccccgcctatagcaggtggcaggatcccattttctcactggcgactcccctgcgtgctggtgaagaaggcagccacagtcggaagtcgctgtgcagaagcagagaggaggccccgcctggggaccggggtgcaccgcttagctcggcccccatcctagggggctggtttggcaggggctgcacaaaacgcacaaaaaggaagaaagtgacgtaatcacgtgctcgatgaagaacagttggcactttgcagatggccagtgtcacggtgaaggctgggttgcccccacgggtctagggagaacgaactctttggggatgacattttcaccgtgacatttttagccatttgtccttgaggaagccccttgcactgctgcggttgtaccctgatacggcctggccatcgaggacacctgcccatccggcctctgtgtcaagaggtggcagccgcacctttctgtgagaacggaactcgggttatttcagccccggcctgcagagtggaagcgcccagcggcctttcctcgctcaccaggccagtctcagggcctcaccgtatttctactactacttaatgaaaaagtgtgaactttatagaatcctctctgtactggatgtgcggcagaggggtggctccgagcctcggctctatgcagacctttttatttctattaaacgtttctgcactggcaaaaa

SEQ ID NO: 156 - DNA, 1940 bp, Homo sapiens
ggggcggtgcagaggcggcaggaagatggagttggggagttgcctggagggcgggagggaggcggcggaggaagagggcgagcctgaggtgaaaaagcggcgacttctgtgtgtggagtttgcctcggtcgcaagctgcgatgccgcagtggctcagtgcttcctggccgagaacgactgggagatggaaagggctctgaactcctacttcgagcctccggtggaggagagcgccttggaacgccgacctgaaaccatctctgagcccaagacctatgttgacctaaccaatgaagaaacaactgattccaccacttctaaaatcagcccatctgaagatactcagcaagaaaatggcagcatgttctctctcattacctggaatattgatggattagatctaaacaatctgtcagagagggctcgaggggtgtgttcctacttagctttgtacagcccagatgtgatatttctacaggaagttattcccccatattatagctacctaaagaagagatcaagtaattatgagattattacaggtcatgaagaaggatatttcacagctataatgttgaagaaatcaagagtgaaattaaaaagccaagagattattccttttccaagtaccaaaatgatgagaaaccttttatgtgtgcatgtgaacgtgtcaggaaatgagctttgccttatgacatcccatttggagagcaccagagggcatgctgcggaacgaatgaatcagttaaaaatggttttaaagaaaatgcaagaggctccagagtcagctacagttatatttgcaggagatacaaatctaagggatcgagaggttaccagatgtggtggtttacccaacaacattgtggatgtctgggagtttttgggcaaacctaaacattgccagtatacatgggatacacaaatgaactctaatcttggaataactgctgcttgtaaacttcgttttgatcgaatatttttcagagcagcagcagaagagggacacattattccccgaagtttggaccttcttggattagaaaaactggactgtggtagatttcctagtgatcactggggtcttctgtgcaacttagatataatattgtaaaatgcttttcaagtgtgggttttgccctgattgttgcaaatacaatttccaccttctggaaaggtaggtttgctgtggaggaaataatgtactagatcattgtcacagaaaaaccaactatgatttatggttgtgttttcagaattcaacattaaagattaatgtttatttaaacgaacacattcctgcattcaggatgtgaggccatttaataaaaagggcacaaagcctgtcagagttttcaacggtgcttatagctgccagctggattccaaacaggtaccacattgtctctgagctaatgtttatatttttccattcaggcaccgaaatagttaatatttgaaataagtcttcaaaagaaaacataagagattattgagttcttgggactggatcctttatttcataagttcagatcatcttaaatgaaaatgccatgattatctgcagttaagtagatgacagctattctacatcagacttgatttttgtcagctaattacataattggtaagctataattgaaaccttatggcttaaaattccttaactcctttttgattcatgtttgtagtcatgttgtcaacagaggcaaagttaagcttgatgatggttaaaatcggtttgatagcaccatgggacatttttctaacaaaaataaatgcatgaagagacatagccttttagttttgctaattgtgaaatggaaatgctttacaggaagtaaatgcaaattacttttaagtgtgctttaaagaaaaatattttccccacaagagaaatttaaataaagaattttatttgtttaaaaaaaaaaaaaaaa

SEQ ID NO: 157 - DNA, 5433 bp, Homo sapiens
ggggagattcgggaccatggcacctgtgcacggcgacgactctctgtcagattcagggagttttgtatcttctcgagcccggcgagaaaaaaaatcaaagaaggggcgccaagaagccctagaaagactgaaaaaggctaaagctggtgagaagtataaatatgaagtcgaggacttcacaggtgtttatgaagaagttgatgaagaacagtattcgaagctggttcaggcacgccaggatgatgactggattgtggatgatgatggtattggctatgtggaagatggccgagagatttttgatgatgaccttgaagatgatgcccttgatgctgatgagaaaggaaaagatggtaaagcacgcaataaagacaagaggaatgtaaagaagctcgcagtgacaaaaccgaacaacattaagtcaatgttcattgcttgtgctggaaagaaaactgcagataaagctgtagacttgtccaaggatggtctgctaggtgacattctacaggatcttaacactgagacacctcaaataactccaccacctgtaatgatactgaagaagaaaagatccattggagcttcaccgaatcctttctctgtgcacaccgccacggcagttccttcaggaaaaattgcttcccctgtctccagaaaggagcctccattaactcctgttcctcttaaacgtgctgaatttgctggcgatgatgtacaggtcgagagtacagaagaagagcaggagtcaggggcaatggagtttgaagatggtgactttgatgagcccatggaagttgaagaggtggacctggagcctatggctgccaaggcttgggacaaagagagtgagccagcagaggaagtgaaacaagaggcggattctgggaaagggaccgtgtcctacttaggaagttttctcccggatgtctcttgttgggacattgatcaagaaggtgatagcagtttctcagtgcaagaagttcaagtggattccagtcacctcccattggtaaaaggggcagatgaggaacaagtattccacttttattggttggatgcttatgaggatcagtacaaccaaccaggtgtggtatttctgtttgggaaagtttggattgaatcagccgagacccatgtgagctgttgtgtcatggtgaaaaatatcgagcgaacgctttacttccttccccgtgaaatgaaaattgatctaaatacggggaaagaaacaggaactccaatttcaatgaaggatgtttatgaggaatttgatgagaaaatagcaacaaaatataaaattatgaagttcaagtctaagccagtggaaaagaactatgcttttgagatacctgatgttccagaaaaatctgagtacttggaagttaaatactcggctgaaatgccacagcttcctcaagatttgaaaggagaaactttttctcatgtatttgggaccaacacatctagcctggaactgttcttgatgaacagaaagatcaaaggaccttgttggcttgaagtaaaaaagtccacagctcttaatcagccagtcagttggtgtaaagttgaggcaatggctttgaaaccagacctggtgaatgtaattaaggatgtcagtccaccaccgcttgtcgtgatggctttcagcatgaagacaatgcagaatgcaaagaaccatcaaaatgagattattgctatggcagctttggtccatcacagttttgcattggataaagcagccccaaagcctccctttcagtcacacttctgtgttgtgtctaaaccaaaggactgtatttttccatatgctttcaaagaagtcattgagaaaaagaatgtgaaggttgaggttgctgcaacagaaagaacactgctaggttttttccttgcaaaagttcacaaaattgatcctgatatcattgtgggtcataatatttatgggtttgaactggaagtactactgcagagaattaatgtgtgcaaagctcctcactggtccaagataggtcgactgaagcgatccaacatgccaaagcttgggggccggagtggatttggtgaaagaaatgctacctgtggtcgaatgatctgtgatgtggaaatttcagcaaaggaattgattcgttgtaaaagctaccatctgtctgaacttgttcagcagattctaaaaactgaaagggttgtaatcccaatggaaaatatacaaaatatgtacagtgaatcttctcaactgttatacctgttggaacacacctggaaagatgccaagttcattttgcagatcatgtgtgagctaaatgttcttccattagcattgcagatcactaacatcgctgggaacattatgtccaggacgctgatgggtggacgatccgagcgtaacgagttcttgttgcttcatgcattttacgaaaacaactatattgtgcctgacaagcagattttcagaaagcctcagcaaaaactgggagatgaagatgaagaaattgatggagataccaataaatacaagaaaggacgtaagaaaggagcttatgctggaggcttggttttggaccccaaagttggtttttatgataagttcattttgcttctggacttcaacagtctatatccttccatcattcaggaatttaacatttgttttacaacagtacaaagagttgcttcagaggcacagaaagttacagaggatggagaacaagaacagatccctgagttgccagatccaagcttagaaatgggcattttgcccagagagatccggaaactggtagaacggagaaaacaagtcaaacagctaatgaaacagcaagacttaaatccagaccttattcttcagtatgacattcgacagaaggctttgaagctcacagcgaacagtatgtatggttgcctgggattttcctatagcagattttacgccaaaccactggctgccttggtgacatacaaaggaagggagattttgatgcatacgaaagagatggtacaaaagatgaatcttgaagttatttatggagatacagattcaattatgataaacaccaatagcaccaatctggaagaagtatttaagttgggaaacaaggtaaaaagtgaagtgaataagttgtacaaactgcttgaaatagacattgatggggttttcaagtctctgctactgctgaaaaaaaagaagtacgctgctctggttgttgagccaacgtcggatgggaattatgtcaccaaacaggagctcaaaggattagatatagttagaagagattggtgtgatcttgctaaagacactggaaactttgtgattggccagattctttctgatcaaagccgggacactatagtggaaaacattcagaagaggctgatagaaattggagaaaatgtgctaaatggcagtgtcccagtgagccagtttgaaattaacaaggcattgacaaaggatccccaggattaccctgataaaaaaagcctacctcatgtacatgttgccctctggataaattctcaaggaggcagaaaggtgaaagctggagatactgtgtcatatgtcatctgtcaggatggatcaaacctcactgcaagtcagagggcctatgcgcctgagcagctgcagaaacaggataatctaaccattgacacccagtactacctggcccagcagatccacccagtcgtggctcggatctgtgaaccaatagacggaattgatgctgtcctcattgcaacgtggttgggacttgaccccacccaatttagagttcatcattatcataaagatgaagagaatgatgctctacttggtggcccagcacagctcactgatgaagagaaatacagggactgtgaaagattcaaatgtccatgccctacatgtggaactgagaatatttatgataatgtctttgatggttcgggaacagatatggagcccagcttgtatcgttgcagtaacatcgattgtaaggcttcacctctgacctttacagtacaactgagcaacaaattgatcatggacattagacgtttcattaaaaagtactatgatggctggttgatatgtgaagagccaacctgtcgcaatcgaactcgtcaccttccccttcaattctcccgaactgggcctctttgcccagcctgcatgaaagctacacttcaaccagagtattctgacaagtccctgtacacccagctgtgcttttaccggtacatttttgatgcggagtgtgcactggagaaacttactaccgatcatgagaaagataaattgaagaagcaattttttacccccaaagttctgcaggactacagaaaactcaagaacacagcagagcaattcttgtcccgaagtggctactccgaagtgaatctgagcaaactcttcgctggttgtgccgtgaaatcctaagggaatcccaggagtaaccaaggagggggtagttgaaaaatcccagcttcctctgtgcctccactctggccctaaatgctcctccagcatctgtttctcccttgggactgtgtctcatgtttgtgtgaatgtagaccaggaaagggggctgcaaaaatgttgagtctaatgttcgtaagcatcatagaaattcctgtcttcatattaagatgtactgctttaaaacacaactccagagcccctccccaagctcccctccccaagctcctgaagacccggtttctgagggagggaaattgctacttggattgagagtagctggaatgtaagtgaccccaggctttgctcagggcctttagcctatgtcccccccacataaagagagcttctcagagcctgactgaagagctgacgttttgctttttcatatgccaattaaacccggtctaaatccaaatgcttctccagccatccaggagtggctgtccttttcagtcttgtcttttatataggtagctgagggggaagatttagaagccttgcactcactaaatagattaaacagagcaggcttgtttgttgaattgctccaaagtccaacagacacacactgagcaggtgttttacactcacattccctttttgccccttaaatagaaagtgcaggtaaaggtttatacaacaagaaagcacattgaaaataatttgatactctaacaatccattaacatgtgtaggggttacggtgaggatcatgtgttgtattcgaaaaacggggagagggatgcttaattggccctcgcttgctatttttttctcatttcttcacaataggaccgtctttggcagcagcaaaatgtatttcagtatggcagtctttcctctcttacattattggtaagattatactaacaaaatgtttccccttgtacaattatgctgtgtttttaaaaaacattgacctgtgtgtttttataaaagaaaaagtatgttgtgccttcttcttaagaataaagttttctaaaggg

SEQ ID NO: 158 - DNA, 2217 bp, Homo sapiens
ccctacctcatagatatgtaggacatccccgggcccggaatgcggctctctgaccctctctgtgccctcccccgccccccgaaccaggcttggcgggcggaggcgccagcggatgtctcatgcaaggatcgtctctgtggctaagcctcactttccgctccgcccgggtgctctctagagcccggtttttcgagtggcagtctccagggctgccgaatacagcagcgatggagaacggcaccgggccctacggagaagaacgtccacgtgaagtccaggagacgacagtcaccgagggggctgccaaaatcgcctttcccagtgccaacgaggtcttttataacccggtgcaggaattcaatcgggacctgacatgtgctgtgatcaccgagtttgctcgcattcagcttggggccaaaggaatccagatcaaggttccaggagagaaggacacgcaaaaagtggtcgtggacttgtcagagcaagaggaggaaaaggttgaactgaaagagagtgaaaacctggcctcaggagaccaacctcgcacagcggccgtgggggagatctgtgaggaaggcctgcatgtgctggaaggcctggcagcttcaggcctacgttccattcgatttgccctagaggtgcctgggctcagatctgtggttgcaaacgatgcctccacccgggctgtggatctcatacgccggaatgtccagctcaatgacgtggcccacctggtacagccgagccaagcagatgcccggatgctgatgtaccagcaccagagggtgtcggagaggtttgacgtcatcgatctggacccctatggcagcccagccaccttcctggatgcagctgtgcaggctgtgagtgaaggagggttgctgtgtgtgacctgcacagacatggcggtgttggcggggaacagcggggagacgtgctacagcaagtacggggccatggccctcaagagccgggcctgccacgagatggccctgagaatcgtcctgcacagcctggacctccgcgccaactgctaccagcgcttcgtggtgccgctgctcagcatcagcgctgacttctacgtgcgtgtttttgtccgtgtcttcaccggccaggccaaggtcaaggcctcagccagcaagcaggcgctggtgttccagtgtgtgggctgcggggccttccaccttcagcgtctcggcaaagcgtcaggagtccccagcggccgggccaagttctctgcagcctgtggtccccctgtgacccccgagtgtgaacactgtgggcaacgacaccagcttggtggccccatgtgggcagagcccatccatgacctggattttgtgggccgtgtcctggaggctgtgagcgctaaccccggccgcttccacacctcggagcggatccgaggggtcctgagcgtcatcactgaggagctcccggacgtgcctctgtactacaccctggaccagctgagcagcaccatccactgcaacacaccaagcctcctgcagttgcggtcggccctcctccacgctgacttccgggtctcactctcccacgcctgtaagaacgctgtgaagacggatgcccctgcctctgccctctgggacatcatgcgttgctgggagaaggaatgtccggtgaaacgggagcgactatcagagactagcccagcgttccgcattctcagtgtggagcccaggctgcaggccaacttcaccatccgggaagatgccaaccccagctcccgacagcgaggactcaagcgcttccaggctaacccggaggccaactggggtccccggcctcgtgcccggccagggggcaaggcggccgacgaagctatggaggagagacgcaggctgcttcagaacaagcggaaggagccgccggaagatgtggcccagcgggctgcccggctcaagacatttccttgcaagaggtttaaggagggcacctgtcaacgcggggaccagtgctgctactcccacagccccccgacacccagggtttctgctgatgctgcccctgactgtccagagacctccaaccagaccccccctggacctggggctgccgctgggccaggcatagactgaaccaataaagagatgtcacgtcaccttctcccgaaaaaaaaaaaaaaaaaaaaaaaaaaaaaaaaaaaaaaaaaaaaaaaaaaaaaaaaaaaaaaaaaaaaaaaaaaaaaaaaaaaaa

SEQ ID NO: 159 - DNA, 2737 bp, Homo sapiens
aagcggcatggaggaggcggaggccgcggcgagccgggccgagcagtgagggccctagcggggcccgagcggggcccggggcccctaagccattcctgaagtcatgggctggccaggacattggtgacccgccaatccggtatggacgactggaagcccagccccctcatcaagccctttggggctcggaagaagcggagctggtaccttacctggaagtataaactgacaaaccagcgggccctgcggagattctgtcagacaggggccgtgcttttcctgctggtgactgtcattgtcaatatcaagttgatcctggacactcggcgagccatcagtgaagccaatgaagacccagagccagagcaagactatgatgaggccctaggccgcctggagcccccacggcgcagaggcagtggtccccggcgggtcctggacgtagaggtgtattcaagtcgcagcaaagtatatgtggcagtggatggcaccacggtgctggaggatgaggcccgggagcagggccggggcatccatgtcattgtcctcaaccaggccacgggccacgtgatggcaaaacgtgtgtttgacacgtactcacctcatgaggatgaggccatggtgctattcctcaacatggtagcgcccggccgagtgctcatctgcactgtcaaggatgagggctccttccacctcaaggacacagccaaggctctgctgaggagcctgggcagccaggccggccctgccctgggctggagggacacatgggccttcgtgggacgaaaaggaggtcctgtcttcggggagaaacattctaaatcacctgccctctcttcctggggggacccagtcctgctgaagacagatgtgccattgagctcagcagaagaggcagagtgccactgggcagacacagagctgaaccgtcgccgccggcgcttctgcagcaaagttgagggctatggaagtgtatgcagctgcaaggaccccacacccatcgagttcagccctgacccactcccagacaacaaggtcctcaatgtgcctgtggctgtcattgcagggaaccgacccaattacctgtacaggatgctgcgctctctgctttcagcccagggggtgtctcctcagatgataacagttttcattgacggctactatgaggaacccatggatgtggtggcactgtttggtctgaggggcatccagcatactcccatcagcatcaagaatgcccgcgtgtctcagcactacaaggccagcctcactgccactttcaacctgtttccggaggccaagtttgctgtggttctggaagaggacctggacattgctgtggattttttcagtttcctgagccaatccatccacctactggaggaggatgacagcctgtactgcatctctgcctggaatgaccaggggtatgaacacacggctgaggacccagcactactgtaccgtgtggagaccatgcctgggctgggctgggtgctcaggaggtccttgtacaaggaggagcttgagcccaagtggcctacaccggaaaagctctgggattgggacatgtggatgcggatgcctgaacaacgccggggccgagagtgcatcatccctgacgtttcccgatcctaccactttggcatcgtcggcctcaacatgaatggctactttcacgaggcctacttcaagaagcacaagttcaacacggttccaggtgtccagctcaggaatgtggacagtctgaagaaagaagcttatgaagtggaagttcacaggctgctcagtgaggctgaggttctggaccacagcaagaacccttgtgaagactctttcctgccagacacagagggccacacctacgtggcctttattcgaatggagaaagatgatgacttcaccacctggacccagcttgccaagtgcctccatatctgggacctggatgtgcgtggcaaccatcggggcctgtggagattgtttcggaagaagaaccacttcctggtggtgggggtcccggcttccccctactcagtgaagaagctaccctcagtcaccccaattttcctggagccacccccaaaggaggagggagccccaggagccccagaacagacatgagacctcctccaggaccctgcggggctgggtactgtgtacccccaggctggctagcccttccctccatcctgtaggattttgtagatgctggtaggggctggggctaccttgtttttaacatgagacttaattactaactccaaggggagggttcccctgctccaacaccccgttcctgagttaaaagtctgtttatttacttccttgttggagaagggcaggagagtacctgggaatcattacgatccctagcagctcatcctgccctttgaataccctcactttccaggcctggctcagaatctaacctatttattgactgtcctgagggccttgaaaacaggccgaacctggagggcctggatttctttttgggctggaatgctgcccctgagggtggggctggctcttactcaggaaactgctgtgcccaacccatggacaggcccagctggggcccacatgctgacacagactcactcagagacccttagacactggaccaggcctcctctcagccttctctttgtccagatttccaaagctggataagttggtcattgattaaaaaaggagaagccctctgggaaaaaaaaaaaaaaaaaaaaaaaaa

SEQ ID NO: 160 - DNA, 2317 bp, Homo sapiens
aaaactccaggaggcggaggaggctagtggcagtacctgggcaccctgaccctccccacaggccagagcccaccctcctgctcatgagggcagacaggcctttccagggacacagtccctcttctccccaggaccccagggccaactccccctgccggccctctgccatcaaattggcagtggctccaggggagtcccctggggatgggggaccactgttggggacccctctgcgtgcacccctgtagttggggaagcaggacaggggcctggggagacggaagggcgccaggggttgagagaggatggtggacgttgttggacttgaaagggaaacaggccctcggggaagcccctggccaggcctgcctctcccctccctggtgggcccagcgcccctgctcacttgtctctgcccacagtgcctgtctgtggaggacgccctgggcctgggcgagcctgaggggtcagggctgcccccgggcccggtcctggaggccaggtacgtcgcccgcctcagtgccgccgccgtcctgtacctcagcaaccccgagggcacctgtgaggacgctcgggctggcctctgggcctctcatgcagaccacctcctggccctgctcgagagccccaaggccctgaccccgggcctgagctggctgctgcagaggatgcaggcccgggctgccggccagacccccaagacggcctgcgtagatatccctcagctgctggaggaggcggtgggggcgggggctccgggcagtgctggcggcgtcctggctgccctgctggaccatgtcaggagcgggtcttgcttccacgccttgccgagccctcagtacttcgtggactttgtgttccagcagcacagcagcgaggtccctatgacgctggccgagctgtcagccttgatgcagcgcctgggggtgggcagggaggcccacagtgaccacagtcatcggcacaggggagccagcagccgggaccctgtgcccctcatcagctccagcaacagctccagtgtgtgggacacggtatgcctgagtgccagggacgtgatggctgcatatggactgtcggaacaggctggggtgaccccggaggcctgggcccaactgagccctgccctgctccaacagcagctgagtggagcctacacctcccagtccaggccccccgtccaggaccagctcagccagtcagagagatatctgtacggctccctggccacgctgctcatctgcctctgcgcggtctttggcctcctgctgctgacctgcactggctgcaggggggtcgcccactacatcctgcagaccttcctgagcctggcagtgggtgcactcactggggacgctgtcctgcatctgacgcccaaggtgctggggctgcatacacacagcgaagagggcctcagcccacagcccacctggcgcctcctggctatgctggccgggctctacgccttcttcctgtttgagaacctcttcaatctcctgctgcccagggacccggaggacctggaggacgggccctgcggccacagcagccatagccacgggggccacagccacggtgtgtccctgcagctggcacccagcgagctccggcagcccaagcccccccacgagggctcccgcgcagacctggtggcggaggagagcccggagctgctgaaccctgagcccaggagactgagcccagagttgaggctactgccctatatgatcactctgggcgacgccgtgcacaacttcgccgacgggctggccgtgggcgccgccttcgcgtcctcctggaagaccgggctggccacctcgctggccgtgttctgccacgagttgccacacgagctgggggacttcgccgccttgctgcacgcggggctgtccgtgcgccaagcactgctgctgaacctggcctccgcgctcacggccttcgctggtcttacgtggcactcgcggttggagtcagcgaggagagcgaggcctggatcctggcagtggccaccggcctgttccttacgtagcactctgcgacatgctcccggcgatgttgaaagtacgggacccgcggcccctggctcctcttcctgctgcacaacgtgggcctgctgggcggctggaccgtcctgctgctgctgtccctgtacgaggatgacatcaccttctgataccctgccctagtcccccacctttgacttaagatcccacacctcacaaacctacagcccagaaacccagaagcccctatagaggccccagtcccaactccagtaaagacactcttgtcccttggaaaaaaaaaaaaaaaaaaa

SEQ ID NO: 161 - DNA, 2657 bp, Homo sapiens
aagtgacgcatggtacttgcgcaaagacgacgaggaggctgcgaaaagttaagggccggaccgcaggctgtgctcgcttccggaagtggcttctgcgacaacatgcttgcggacctcggcttaatcggaaccataggcgaggatgacgaggtgccggtggagcccgagtctgactccggggacgaggaagaggaggggcccattgtgctgggcagacgacaaaaagctttggggaagaaccgcagtgctgatttcaaccctgatttcgttttcactgagaaggaggggacgtacgatggcagctgggccctggctgatgtcatgagccaactcaagaagaagagggcagccactacattagatgagaagattgagaaagttcgaaagaaaaggaaaacagaggataaagaagccaagtctgggaagttggaaaaggagaaagaagcaaaggaaggctctgaaccaaaggagcaggaagaccttcaagagaatgatgaggaaggctcagaagatgaagcctcggagactgactactcatcagctgatgagaacatcctcaccaaagcagatacactcaaagtaaaggatcggaagaagaagaagaagaaaggacaggaagcaggaggattttttgaagatgcatctcagtacgatgaaaacctctcgttccaggacatgaacctttcccgccctcttctgaaggccattacagccatgggcttcaagcagcccaccccgatccagaaggcgtgcatacctgtgggtctattggggaaggacatctgtgcctgtgcagccactgggacaggtaaaactgccgcctttgccctgcctgttttggagcgtctgatttataaaccccgccaggctccagtcacccgcgtgctggtgctagtgcccacccgagagctgggcatccaggtgcactctgtcaccagacagctggcccagttctgcaacatcaccacctgcctggctgtgggcggcttggatgtgaagtctcaggaagcagctcttcgggcagcgcctgacatcctcatcgccaccccaggccggctcatcgatcacctccacaactgcccttccttccacctgagcagcatcgaggtgctcatcctggacgaggctgacaggatgctggatgagtactttgaggagcagatgaaggagatcatccgaatgtgttcccaccaccgccagaccatgctcttctcggccaccatgacagacgaggtgaaagatctggcttctgtctccttgaagaatcctgtccggatatttgtgaacagcaacacagatgtggctcccttcctgcggcaggagttcatccggatccggcctaatcgtgaaggagaccgggaagccatcgtggcagctttgttgacgaggaccttcactgaccatgtgatgctgttcacgcaaaccaagaagcaggcccaccgcatgcacatcctcctggggctcatggggctgcaggtgggtgagctccatggcaacttgtcacagacgcagcggctggaggccctccggcgttttaaggatgaacagattgacatcctcgtggccactgatgtggcagcccgtggacttgacattgagggggtcaaaacggtaatcaacttcacaatgcctaataccatcaaacattatgtccaccgggtggggcgaacagcacgtgctggcagggctgggcgctcagtctctctggtgggagaagatgagcggaagatgctgaaggagattgtaaaagctgccaaggcccctgtgaaggccaggatacttccccaagatgtcatcctcaaattccgggacaagattgagaaaatggagaaagatgtgtatgcagttctgcagctagaggcggaggaaaaagagatgcagcagtcagaagcccagatcaatacagcaaagcggctcctggagaaggggaaggaggcagtggtccaagagcccgagaggagctggttccagaccaaagaagagaggaagaaggagaaaattgccaaagctctgcaggaatttgacttggccttaagaggaaagaagaaaaggaagaagtttatgaaggatgccaaaaaaaagggggagatgacagcagaggaaaggtctcagtttgaaatcctcaaggcgcagatgtttgctgaacggctagcgaagaggaatcgcagagccaagcgggcccgagcaatgcccgaggaggagccagtgagaggtcctgccaagaagcaaaagcaggggaagaaatctgtatttgatgaagaactcaccaacacaagcaagaaggccctgaaacagtatcgagctagcccttcctttgaagaaaggaaacagttgggcttgccccaccagagacgaggaggaaactttaaatctaaatccagatacaagaggaggaagtagctgtcgtggcctgaagaaattcatgggggcagcccttaaatcccttccctgtgggaagtcatcctggctggtctgtcttttctccatttgtttaaaaaaaaaacaaaaacaaaaaacaacactttggtgtggtggtatggtacgtagctattttcctaagcatgtctgtcaatctcccttcttgctgattagctttcatatgactatattaaatggaagtatttttgggaaaagagaaaccaaaaaaaaaaaaaaaa

SEQ ID NO: 162 - DNA, 2958 bp, Homo sapiens
gaacgtgcctgcgcaatgggtgtcgggtccgctttttcccaatccggacgtaatcgtggtttttgttctgcaataggcggcttagagggaggggctttttcgcctatacctactgtagcttctccacgtatggaccctaaaggctactgctgctactacggggctagacagttactgtctcagctctaggatgtgcgttcttccactagaagctcttctgagggaggtaattaaaaaacagtggaatggaaaaacagtgctgtagtcatcctgtaatatgctccttgtcaacaatgtatacattcctgctaggtgccatattcattgctttaagctcaagtcgcatcttactagtgaagtattctgccaatgaagaaaacaagtatgattatcttccaactactgtgaatgtgtgctcagaactggtgaagctagttttctgtgtgcttgtgtcattctgtgttataaagaaagatcatcaaagtagaaatttgaaatatgcttcctggaaggaattctctgatttcatgaagtggtccattcctgcctttctttatttcctggataacttgattgtcttctatgtcctgtcctatcttcaaccagccatggctgttatcttctcaaattttagcattataacaacagctcttctattcaggatagtgctgaagaggcgtctaaactggatccagtgggcttccctcctgactttatttttgtctattgtggccttgactgccgggactaaaactttacagcacaacttggcaggacgtggatttcatcacgatgcctttttcagcccttccaattcctgccttcttttcagaagtgagtgtcccagaaaagacaattgtacagcaaaggaatggacttttcctgaagctaaatggaacaccacagccagagttttcagtcacatccgtcttggcatgggccatgttcttattatagtccagtgttttatttcttcaatggctaatatctataatgaaaagatactgaaggaggggaaccagctcactgaaagcatcttcatacagaacagcaaactctatttctttggcattctgtttaatgggctgactctgggccttcagaggagtaaccgtgatcagattaagaactgtggatttttttatggccacagtgcattttcagtagcccttatttttgtaactgcattccagggcctttcagtggctttcattctgaagttcctggataacatgttccatgtcttgatggcccaggttaccactgtcattatcacaacagtgtctgtcctggtctttgacttcaggccctccctggaatttttcttggaagccccatcagtccttctctctatatttatttataatgccagcaagcctcaagttccggaatacgcacctaggcaagaaaggatccgagatctaagtggcaatctttgggagcgttccagtggggatggagaagaactagaaagacttaccaaacccaagagtgatgagtcagatgaagatactttctaactggtacccacatagtttgcagctctcttgaaccttattttcacattttcagtgtttgtaatatttatcttttcactttgataaaccagaaatgtttctaaatcctaatattctttgcatatatctagctactccctaaatggttccatccaaggcttagagtacccaaaggctaagaaattctaaagaactgatacaggagtaacaatatgaagaattcattaatatctcagtacttgataaatcagaaagttatatgtgcagattattttccttggccttcaagcttccaaaaaacttgtaataatcatgttagctatagcttgtatatacacatagagatcaatttgccaaatattcacaatcatgtagttctagtttacatgccaaagtcttccctttttaacattataaaagctaggttgtctcttgaattttgaggccctagagatagtcattttgcaagtaaagagcaacgggaccctttctaaaaacgttggttgaaggacctaaatacctggccataccatagatttgggatgatgtagtctgtgctaaatattttgctgaagaagcagtttctcagacacaacatctcagaattttaatttttagaaattcatgggaaattggatttttgtaataatcttttgatgttttaaacattggttccctagtcaccatagttaccacttgtattttaagtcatttaaacaagccacggtggggcttttttctcctcagtttgaggagaaaaatcttgatgtcattactcctgaattattacattttggagaataagagggcattttattttattagttactaattcaagctgtgactattgtatatctttccaagagttgaaatgctggcttcagaatcataccagattgtcagtgaagctgatgcctaggaacttttaaagggatcctttcaaaaggatcacttagcaaacacatgttgacttttaactgatgtatgaatattaatactctaaaaatagaaagaccagtaatatataagtcactttacagtgctacttcacacttaaaagtgcatggtatttttcatggtattttgcatgcagccagttaactctcgtagatagagaagtcaggtgatagatgatattaaaaattagcaaacaaaagtgacttgctcagggtcatgcagctgggtgatgatagaagagtgggctttaactggcaggcctgtatgtttacagactaccatactgtaaatatgagctttatggtgtcattctcagaaacttatacatttctgctctcctttctcctaagtttcatgcagatgaatataaggtaatatactattatataattcatttgtgatatccacaataatatgactggcaagaattggtggaaatttgtaattaaaataattattaaacctaaaaaaaaaaaaaaaaaaa

SEQ ID NO: 163 - DNA, 2247 bp, Homo sapiens
taaatgtgccacgtcttctaagaagggggagtcctgaacttgtctgaagcccttgtccgtaagccttgaactacgttcttaaatctatgaagtcgagggacctttcgctgcttttgtagggacttctttccttgcttcagcaacatgaggcttttcttgtggaacgcggtcttgactctgttcgtcacttctttgattggggctttgatccctgaaccagaagtgaaaattgaagttctccagaagccattcatctgccatcgcaagaccaaaggaggggatttgatgttggtccactatgaaggctacttagaaaaggacggctccttatttcactccactcacaaacataacaatggtcagcccatttggtttaccctgggcatcctggaggctctcaaaggttgggaccagggcttgaaaggaatgtgtgtaggagagaagagaaagctcatcattcctcctgctctgggctatggaaaagaaggaaaaggtaaaattcccccagaaagtacactgatatttaatattgatctcctggagattcgaaatggaccaagatcccatgaatcattccaagaaatggatcttaatgatgactggaaactctctaaagatgaggttaaagcatatttaaagaaggagtttgaaaaacatggtgcggtggtgaatgaaagtcatcatgatgctttggtggaggatatttttgataaagaagatgaagacaaagatgggtttatatctgccagagaatttacatataaacacgatgagttatagagatacatctacccttttaatatagcactcatctttcaagagagggcagtcatctttaaagaacattttatttttatacaatgttctttcttgctttgttttttatttttatatattttttctgactcctatttaaagaaccccttaggtttctaagtacccatttctttctgataagttattgggaagaaaaagctaattggtctttgaatagaagacttctggacaatttttcactttcacagatatgaagctttgttttactttctcacttataaatttaaaatgttgcaactgggaatataccacgacatgagaccaggttatagcacaaattagcaccctatatttctgcttccctctattttctccaagttagaggtcaacatttgaaaagccttttgcaatagcccaaggcttgctattttcatgttataatgaaatagtttatgtgtaactggctctgagtctctgcttgaggaccagaggaaaatggttgttggacctgacttgttaatggctactgctttactaaggagatgtgcaatgctgaagttagaaacaaggttaatagccaggcatggtggctcatgcctgtaatcccagcactttgggaggctgaggcgggcggatcacctgaggttgggagttcgagaccagcctgaccaacacggagaaaccctatctctactaaaaatacaaaagtagccgggcgtggtgatgcgtgcctgtaatcccagctacccaggaaggctgaggcggcagaatcacttgaacccggaggcggaggttgcggtaagccgagatcacctccagcctggacactctgtctcgaaaaaaagaaaagaaacacggttaataacatataaatatgtatgcattgagacatgctacctaggacttaagctgatgaagcttggctcctagtgattggtggcctattatgataaataggacaaatcatttatgtgtgagtttctttgtaataaaatgtatcaatatgttatagatgaggtagaaagttatatttatattcaatatttacttcttaaggctagcggaatatccttcctggttctttaatgggtagtctatagtatattatactacaataacattgtatcataagataaagtagtaaaccagtctacattttcccatttctgtctcatcaaaaactgaagttagctgggtgtggtggctcatgcctgtaatcccagcactttgggggccaaggagggtggatcacttgagatcaggagttcaagaccagcctggccaacatggtgaaaccttgtctctactaaaaatacaaaaattagccaggcgtggtggtgcacacctgtagtcccagctactcgggaggctgagacaggagatttgcttgaacccgggaggcggaggttgcagtgagccaagattgtgccactgcactccagcctgggtgacagagcaagactccatctc

SEQ ID NO: 164 - DNA, 2811 bp, Homo sapiens
cctaggccagccccccccgcaggaagagtccccttcctctgaagcaaagagcagaggacccaccccaccagccatgggcccacgggatgccagacctcctcgaaggagcagccagccatctccaacagcagtgccagcctccgacagccctcccaccaagcaagaggtgaagaaggcaggagagagacacaagctggcaaaggagcggcgagaagagcgggccaagtacctggcggccaagaaggcagtgtggctggagaaggaggagaaggccaaggcgctgcgggagaagcagctccaggagcgccggcgccggctggaggagcaacgtcttaaagccgagcaacgccgtgcagccctggaggaacggcagcggcagaagctcgagaaaacagcaaggagcgctatgaagcagccatccaacggtcagtgaagaagacgtgggccgaaatccggcagcagcgctggtcctgggcaggggccctgcaccacagctctccaggacataagaccagtgggagcaggtgctccgtgtcggcagttaacctgcccaaacacgtggactctataatcaacaagcggctctcaaagtcctctgccacgctctggaactcccccagtagaaatcgcagcctgcagctgagcgcatgggagagcagcatcgtggatcgtctgatgacgcccactctctccttccttgctcggagtcgcagcgcggtcacactgccccgcaacggccgggaccaggccgtgccggtgtgcccgcgctcggcctccgccagccccctgacgccgtgcagcgtcacccgaagcgtgcaccgctgcgcccccgccggtgagcgcggggagcgccgcaagcccaacgccgggggcagccccgctccggtgcgccgccggccggaggcctcgccggtgcagaaaaaggagaagaaggacaaggagcgggaaaacgagaaggagaagagtgccctagcccgggagcgcagcctcaagaagcgccagtcgctgcccgcctccccacgtgcccgcctctccgccagcaccgcctctgagctcagccccaaatccaaggccaggccatcctctccctccacatcctggcacaggcctgcctccccctgccccagcccagggccaggccacactctgcctccaaagccaccgtccccccgaggcaccactgcatcccccaaggggcgggttcggaggaaggaggaggcaaaggagagccccagcgccgcagggcccgaggacaagagccagagcaagcgcagggccagtaacgagaaggagtcagcagccccagcctcaccggcaccttcgccggcgccctcgcccaccccagccccgccccagaaggagcagccccccgcggagacccctacagacgctgctgtcttgacctcacccccagcccctgctcccccggtgacccctagcaaaccaatggccggcaccacagaccgagaagaagccactcggctcttggctgaaaagcggcgccaggcccgggagcagcgggagcgcgaggagcaggagcggaggctgcaggcagaaagggacaagcgaatgcgagaggagcagctggcacgggaggccgaggcccgggcggagcgggaggcggaggcccggaggcgggaggagcaggaggcacgagagaaggcgcaggccgagcaggaggagcaggagcggctgcagaagcagaaagaggaggccgaagctcggtcgcgggaagaggcggagcggcagcgtctggagcgggaaaagcacttccagcagcaggagcaagagcggcaagagcgcagaaagcgtctggaggagatcatgaagaggactcggaagtcagaagtttctgaaaccaagaagcaggacagcaaggagcgcrawcgccaacggttccagcccagagcctgtgaaagctgtggaggctcggtccccagggctgcagaaggaggctgtgcagaaagaggagcccatcccacaggagcctcagtggagtctcccaagcaaggagttgccagcgtccctggtgaatggcctgcagcctctcccagcacaccaggagaatggcttctccaccaacggaccctctggggacaagagtctgagccgaacaccagagacactcctgccctttgcagaggcagaagccttcctcaagaaagctgtggtgcagtccccgcaggtcacagaagtcctttaagagggtttgccttggatccgggcacagttgtgagggctcctctgcatcacctaccaggatgtctggaggagaaaaagacagaacaaagatggaagtggcctgggcccctgggggtgggtcctctctgttgtttttaatctgcaccttatagactgatgtctctttggccggagccagatctgcccctcagtgcattcgtgtgctcgcacgcgcagacatcccttctcccccatacacacatatacactcacagcctctctggcctcttcccttggggaggggccacctgtagtatttgccttgatttggtggggtacagtggatgtgaatactgtaaatagcttgtgctcagactcctctgcgtggagagggtgggtgcaggaggcagaccctccccccaaagccccctggggagatcttcctctctctatttaactgtaactgagggggatcccaggtctggggatgggggacaccttgggccacaggatactggttgcttcaggggtacccatgccccctgccctcgcctggaatcagtgttactgcatctgattaaatgtctccagaaataaagaataattctgccaaaaaaaaaaaaaaaaaaa

SEQ ID NO: 165 - DNA, 3653 bp, Homo sapiens
acgcggcgctcgcgctccctccttaaatgagcctgggcgccccgcgcccgccacttcagtggatcccgcgccggggccgcgggcggagctgcctgccggtcccgcgccgcgcgtccgcactcctcggccctcgggcggtcgatgggacggggcgccgcggagcaggaggcggcgcccgtcggggtgctcgggccgcgcgggagcccactgtggggctcgggcatggcgggccgcaggacctgagctctcctcaggggagcggggaggcagctgctggccggcgatggggacggagtggggccgtcgccgccgcgccgagccgtgagcgccgagccaccgccgccgctacctcagcccttcgcgaagcgccgggcagctcgggaacatggccctggagcggctctgctcggtcctcaaagtgttgttaataacagtactggtagtggaagggattgccgtggcccaaaaaacccaagatggacaaaatattggaatcaagcatattcctgcaacccagtgtggcatttgggttcgaaccagcaatggaggtcattttgcttcgccaaattatcctgactcatatccaccaaacaaggagtgtatctacattttggaagctgctccacgtcaaagaatagagttgacctttgatgaacattattatatagaaccatcatttgagtgtcggtttgatcacttggaagttcgagatgggccatttggtttctctcctcttatagatcgttactgtggcgtgaaaagccctccattaattagatcaacagggagattcatgtggattaagtttagttctgatgaagagcttgaaggactgggatttcgagcaaaatattcatttattccagatccagactttacttacctaggaggtattttaaatcccattccagattgtcagttcgagctctcgggagctgatggaatagtgcgctctagtcaggtagaacaagaggagaaaacaaaaccaggccaagccgttgattgcatctggaccattaaagccactccaaaagctaagatttatttgaggttcctagattatcaaatggagcactcaaatgaatgcaagagaaacttcgttgcagtctatgatggaagcagttctattgaaaacctgaaggccaagttttgcagcactgtggccaatgatgtaatgcttaaaacaggaattggagtgattcgaatgtgggcagatgaaggtagtcggcttagcaggtttcgaatgctctttacttcctttgtggagcctccctgcacaagcagcactttcttttgccatagcaacatgtgcatcaataattctttagtctgtaatggtgtccaaaattgtgcatacccttgggatgaaaatcattgtaaagaaaagaaaaaagcaggagtatttgaacaaatcactaagactcatggaacaattattggcattacttcagggattgtcttggtccttctcattatttctattttagtacaagtgaaacagcctcgaaaaaaggtcatggcttgcaaaaccgcttttaataaaaccgggttccaagaagtgtttgatcctcctcattatgaactgttttcactaagggacaaagagatttctgcagacctggcagacttgtcggaagaattggacaactaccagaagatgcggcgctcctccaccgcctcccgctgcatccacgaccaccactgtgggtcgcaggcctccagcgtcaaacaaagcaggaccaacctcagttccatggaacttcctttccgaaatgactttgcacaaccacagccaatgaaaacatttaatagcaccttcaagaaaagtagttacactttcaaacagggacatgagtgccctgagcaggccctggaagaccgagtaatggaggagattccctgtgaaatttatgtcagggggcgagaagattctgcacaagcatccatatccattgacttctaatcttctgctaatggtgatgtgaattcttagggtgtgtacgtacgcagcctccagggcaccatactgtttccagcagccaacccttttctcccatcacaactacgaagaccttgatttaccgttaacctattgtatggtgatgtttttattctctcaggcagtctatatatgttaaaccaatcaaggaacttactctattcagtggaaacaataatcatctctattgcttggtgtcatttataggaagcactgccagttaaagagcattagaagaggtggttggatggagccaggctcaggctgcctcttcgttttagcaacaagaagactgctcttgactgataacagctctgtcaatattttgatgccacaataaacttgatttttctttacattccttttatttttcctttctctaaatttaatttgttttataagcctatcgttttaccatttcattttcttacataagtacaagtggttaatgtaccacatacttcagtataggcatttgttcttgagtgtgtcaaaatacagctagttactgtgccaattaagacccagttgtatttcacccatctgtttcttcttggctaatctctgtacttctgccttttaattactgggcccttattccttattttctgtgagaaataatagatgatatgatttattacctttcaattatatttttctcagttatactagaaaatttcataatcctgggatatatgtaccattgtcagctatgactaaaaatttgaaaaagataaaaatttctagcaagcctttgaagtttaccaagtatagtcacattcagtgacagcccattcattccagtaaagaatcatttcattcactttgggagaggcctataattacatttatttgcaatgtttctcttcgctagattgttacatagctcccattctgttggttttgcttacagcatatggtaaccaaggttagatgccagttaaaattccttagaaattggatgagccttgagattgcttcttaactgggacatgacatttttctagctcttatcaagaataacaacttccacttttttttaaactgcacttttgactttttttatggtataaaaacaataatttataaacataaaagctcattgtgttttttagacttttgatattatttgatactgtacaaactttattaaatcaagatgaaagacctacaggacagattcctttcagtgttcacatcagtggctttgtatgcaaatatgctgtgttggacctggacgctataacttattgtaaagaccttggaaatgtggacataagctctttctttccttttgttactgtatttagtttgtgataaatttttcactgtgtgatatttatgctctaaatcactacacaaatcccatattaaaatatacattgtacctgaccctttaatcatgttatttatgccaccaaggttgtggatcttaaggtatgtatggaaaggaactcatttatcaaattgtaagtaatacagacatgccatttaaaagaggtaaattcttgttttctatattttgttagtaaattctcaatgaaataagttgaagtttcactggatttcattaacttttaaatattacatatatgtgttttctcagattagtgaaaattgtgaccttaaatttaatacacatatactgcctcag

SEQ ID NO: 166 - DNA, 3682 bp, Homo sapiens
acggcgcgcgcgcaccccttccgcgcagccccctgacctgcagcctccggacctcgctgcagcgcggacccggcccgcccgcccgaatgagtcagctgaggctgctgccgtcccgtcttggggtacaggctgcgaggctcctggctgcacatgacgtcccggtgtttggctggcgcagcaggtcctccgggccaccggccaccttcccaagcagcaaaggtggaggcggctccagttacatggaggagatgtacttcgcctggttggaaaacccccagagtgtccacaagtcctgggacagcttcttcagggaagccagcgaggaagccttttctggctctgctcagccacggcccccttctgttgtccatgagggcaggtctgcagtctcaagtcggaccaagaccagcaaattggtggaggaccacctggctgtacagtccctgatccgggcctaccagatccggggtcaccatgtggcccagctggaccccctgggcattctggatgcagacctggactcctttgtgccctcagacttgatcacaaccattgataaactggccttctatgaccttcaggaggctgaccttgataaggagttccagctgccgacaaccaccttcattgggggctctgaaaacaccctttctctgcgggagatcattcggcgcctggagaacacctactgccagcacattggcctggagttcatgttcatcaacgatgtggagcagtgccagtggatccggcagaagtttgagacccctggtgtgatgcagttctccagcgaggagaagcggaccctgctggcccggctagtgcgctccatgaggtttgaagacttcctggcccggaaatggtcctcagagaagcggtttggcctggagggctgtgaagtgatgattcctgccctcaagaccatcatcgacaaatccagcgagatggggattgagaatgtcatcttggggatgccacacaggggaaggctgaacgtgctggccaacgtgatccgcaaggacctggagcagatcttctgccggtttgaccccaagctggaggcggcggacgagggctccggggatgtcaagtaccacctgggcatgtaccatgagaggatcaaccgcgtcaccaaccggaacatcactctgtcgctggttgccaacccctcccacctggaggcagtggaccctgtggtgcaggggaagacaaaggcagagcagttctaccgtggagatgcccagggcaagaaggtcatgtccatcctggttcatggggacgccgcctttgctggccagggcgtggtatatgagaccttccacctgagcgacttgccctcctacacgaccaatggtaccgtgcacgtcgtcgtcaacaaccagattggattcaccacagacccccgaatggcccgctcctcaccatacccgaccgacgtggcccgggtggtcaatgcgcctatcttccatgtgaatgccgatgacccagaggctgtgatatatgtgtgcagtgtggcagccgaatggagaaacactttcaacaaagatgttgtcgtggacctggtctgttaccgccggcgtggccacaatgagatggacgagcccatgttcacccagccgctcatgtacaagcagatccacagacaggtgcctgtgctgaagaagtacgcagacaagctgattgccgagggcacagtcaccctgcaggagtttgaggaagaaattgccaaatacgaccggatctgtgaggaggcttatggcaggtccaaggataaaaagattctgcatataaagcactggttggactccccctggcctggcttcttcaacgtagatggggagcccaagagcatgacatgcccagccacggggatccctgaggacatgctcacccacatcggcagtgtggccagctctgtgcccctggaggactttaagatccacactggcctctctcgcattctgcggggccgtgcggacatgaccaagaaccggacggtggactgggcgttggcagagtacatggcctttggctccctgctgaaggaaggcatccacgtgcggctcagcgggcaggatgtggagaggggcacattcagtcaccggcaccatgttctccatgaccaggaggttgaccgcaggacgtgtgtgcctatgaatcatctctggcctgaccaggccccgtacaccgtgtgcaacagctccctctcggagtacggagtcctgggctttgagctgggctatgccatggccagccccaatgccctggtcctctgggaggcccagtttggggacttccacaacacggcccagtgcatcatcgaccagttcatcagcaccggccaggccaagtgggtgcggcataatggcattgtgctgctgctgccccatggcatggaaggcatgggcccagagcactcgtcagcgaggcccgaaaggttcctgcagatgagcaatgatgactcggatgcctaccctgcattcaccaaggacttcgaggtgagccagctctatgactgcaactggatcgtggtcaactgctccacaccggccaactacttccacgtgctgcgccggcagatcctgctgcccttccgcaagccgctgattatcttcacacctaaatctctgctgaggcacccagaggccaagtccagctttgaccaaatggtatccgggaccagcttccagcgggtgattcctgaagatggggccgcagcacgggcccctgagcaggtgcagcggctcatcttctgcacgggaaaggtgtactatgacctggtgaaggagcggagcagccaggacctggaggagaaagtggccatcacgcgcctggagcagatctctccattccccttcgacctgatcaagcaggaggcagagaagtacccaggtgcggagctggcctggtgtcaggaggagcacaagaacatgggctactatgactacatcagcccacgcttcatgaccatcctgaggcgcgcacggcccatatggtatgttggccgggacccagcggctgcaccagccacaggaaacaggaacactcacctggtgtcactgaagaagtttctggatactgccttcaatctccaggcctttgagggcaagacattttagagctgggcaaaacctgtgtaggtctcgctgtgggtttgctggggaccaagggggtgatgaaaaggggaggggcggagctcctgcccaagagaggggctgtggggccccaggataaaacagacacagtgacagggccaagagccagcactgctggccttggtgtcatgccagaatctaccaggactgagggagccagaggagtcctgtaggcaggctactgtgctggagcatcccccagctgctcccatcttgctggaatttcttgggcggcttctccacctgtatctcaagacagacacccgggggcctgtgtctgtggccgctcccatcccggcagccctggctgctgctcgccccaccctcgcttatctgtagattcaaagcgatgttctcttctgtgctcttagaagtagggagttcagcagtaacagccaggtgaagcgaacctgctgggtgatttgtttgcgctctgttttatggggcattcctgcgagatgtgtcagcttctgtatgagatgcagccacagctcatgtgtaccaaagtagaaaaccaaatcacagag

SEQ ID NO: 167 - DNA, 1923 bp, Homo sapiens
cttcctcctcctggccgcttagtctcacacccgccgggccgttgttcccgagacgttgttgagtcccctgtgtcctcttctgggtggaggaactgcaatgtctggtggagaacagaaaccagagaggtactatgtgggtgtggacgttggaacaggcagtgtccgtgcagctctggtggaccagagtggggtcctgttggcttttgcagaccagccaattaagaattgggagccccagttcaaccaccatgagcagtcctccgaggacatctgggctgcgtgctgtgttgtcacaaagaaagttgtacaagggattgatttaaaccaaattcgaggacttgggtttgatgccacgtgttctctggttgttttggataagcagtttcacccattaccagtcaaccaggaaggggattcccatcgaaacgtcatcatgtggctggaccatcgagcagtcagtcaagttaacaggatcaatgagaccaagcacagtgtcctccagtacgtcgggggggtgatgtctgtggaaatgcaggccccgaaacttctgtggctgaaagagaacttgagagagatttgctgggataaggcgggacatttctttgatctcccggacttcttatcgtggaaggcaacaggtgtcacagcacggtctctctgctccctggtgtgtaagtggacatattcagcagagaaaggctgggacgacagtttctggaaaatgattggtttggaagactttgttgcagataattacagcaaaataggaaaccaagtgctacctcctggagcttctcttggaaatgggctcacaccagaggcagcaagagaccttggccttctccctgggattgcggtcgcagcttcactcattgatgcccatgcaggaggactaggagtgattggggcagatgtgagagggcacggcctcatctgtgaggggcagccagtgacgtcacggctggctgtcatctgtggaacgtcttcttgtcacatggggatcagcaaagacccgatttttgtaccaggcgtctgggggccttatttctcagccatggtacctgggttctggctgaatgaaggtggtcagagcgttactggaaaattgatagaccacatggtacaaggccatgctgcttttccagaactacaagtaaaggccacagccagatgccagagtatatatgcatatttgaacagtcacctggatctgattaagaaggctcagcctgtgggtttccttactgttgatttacatgtttggccagatttccatggcaaccggtctcccttagcagatctgacactaaagggcatggtcaccggattgaaactgtctcaggaccttgatgatcttgccattctctacctggccacagttcaagccattgctttggggactcgcttcattatagaagccatggaggcagcagggcactcaatcagtactcttttcctatgtggaggcctcagcaagaatcccctttttgtgcaaatgcatgcggacattactggcatgcctgtggtcctgtcgcaagaggtggagtccgttcttgtgggtgctgctgttctgggtgcctgtgcctcaggggatttcgcttctgtacaggaagcaatggcaaaaatgagcaaagttgggaaagttgtgttcccgagactacaggataaaaaatactatgataagaaataccaagtattcctgaagctggttgaacaccagaaggagtatttggcgatcatgaatgatgactgaacagggcttgcaggtgctgatgccagaagcttctgtgccattgcattaaagacttctgtcatttgatccatgttcaagacccttgaggtattgtttcatcatttctgtattgtctttcaataaagaaaacaaacatgtgcaaccaaaaaaaaaaaaaaaaaaaaaaaaaa

SEQ ID NO: 168 - DNA, 2786 bp, Homo sapiens
gaattcaggtaaaatattctgcctgaccagggctacatgataagccacgtacttgatcactttgtagggtcgcagcacccttcttactactattttaggtaattcaggtttctgacggggaagccagtggagctgagcgggctgcaagaggggtgggttctggatgagaagttgggacgcgtgacgagggagtagagagtgaaccttggcttaaaaggaaggaaaataactgtgaagaaaagatgacccaacttgaaataaaacctgaagaccttatctcccacttgagagagagaagaagctgaaagccatcagcttgcactctgggctcacagacagagagggtgaggggttgagcccagatctatgacttcagacccctgtctcggcccctaggcctgatcattcattcaaactctcaataaacacggattaccagaccctgcgcagggaacacatctgggaaaacagctgcaacctcggataccagcacgggacaagctatctcagggcaatgaggaacaactaaagagaatcccaggaaccaggtaaccaatcgccagaagccctccgccctcatggtccattgggtcaaggccccactgccgcctcgtatcgccagcctccagtcctgcctccacgacgcgcccttccccaaggctggccgggtctggatgtcgccatcccctattcggagctacagacctcgcagctgaactcttaaaaagaacctcgcttcttcctcacggtgctccagctccacacaccgtactgagcctcgccagccaccgtacgcgaggtcgcggcgcgtccgtgacgtcactgatgtgcgcttctcccgcactaagggaaacatggctctagcgcggccggtgcggctcttttccctcgtgactcggttgctcctggcgccgcgacggggcctcacggtccgcagtcccgacgaacccctgccggtggtgcgcatcccagtggctctacagcggcagttggaacagcggcagagcaggcggcggaacctcccgaggccggtgctggttcgacccggaccgctgctggtttcggcgcggcggccggagttgaaccagccggcgcgcctcacactgggccgttgggagcgcgcgccgctagcctctcaaggctggaagagtcgacgcgcgcgtcgggaccacttctccatcgagcgcgcgcaacaggaggcgccagcggtgcgaaagctctcgtctaagggcagctttgctgacctgggcctggagccccgtgtgctgcacgcactacaggaggctgcgcctgaagtcgttcagcccacaaccgtgcagtctagcaccatcccctcactacttcgcggccgccatgtcgtttgcgccgcagaaaccggcagtggcaagactctcagctacctcctgccgctgcttcaacggctcttgggccagccaagcctggactcccttcctatccccgcgccccgaggcctggtccttgttccttcccgagaattggcccaacaggtgcgggctgtggcccaacccttgggccgctccttgggcctgctggtgcgggacctggagggaggccacggcatgcgtaggatcaggctgcagctgtccagacagccttcagcagatgtgcttgtggccactccaggggctctgtggaaggccctgaaaagtcgactgatcagtctggagcaactctccttcttggtgttggatgaggcagacacactgctggatgaaagcttcctggaactggtggactacatcttagagaagagccacatagcagaaggcccagctgacttggaagaccccttcaatcccaaagctcagttagtgctggtaggagccacatttcccgaaggtgtaggccagttgctgaataaagtcgccagcccagatgctgtcaccaccatcaccagctccaagctccactgtatcatgcctcatgtgaaacagacatttctgagactgaagggagcagataaggtggccgagctggtgcacatcctcaagcatcgtgacagagcagaaaggactggtccctcaggaactgttctggtgttctgtaatagctccagcactgtgaactggctgggatatattctggatgaccacaaaatccaacacctaaggttgcaggggcaaatgccagccttgatgagggtaggaatcttccagtccttccagaagagctcccgagacatacttctctgcacagacatagcctctcggggcctggacagcactggtgtggagctggttgtcaattatgatttccccccaacgctgcaagattacatccacagagcagggagagtgggccgtgtggggagcgaggtgccaggcaccgtcatcagttttgtgacccatccctgggatgtgagcctggttcagaagattgagctggcggctcgccgaaggagaagtcttccaggactagcatcctcggtgaaagagcctttgccccaagcaacctgattttgacaaatctgattaaaatgtgatgctagaacagggatctttcccagtatcttgagtgggtgaccacacttgtcagtgggaggctctgggctgccctgtcggctccttgagggcgggatgaactgctttgtgacttggaaaggtacgctgctggccagcattggagaagaagctgctgagcatggctttctgtagtctttagcaagacacaagtggattttgactttgtatcatgtcatgatttctaacaataaatgatgtttttatgtgcctcccctaagaataattagcaccggggcggaattc

SEQ ID NO: 169 - DNA, 2836 bp, Homo sapiens
ccagctcctctgctaccatgaatagggcccctctgaagcggtccaggatcctgcacatggcgctgaccggggcctcagacccctctgcagaggcagaggccaacggggagaagccctttctgctgcgggcattgcagatcgcgctggtggtctccctctactcggtcacctccatctccatggtgttccttaataagtacctgctggacagcccctccctgcggctggacacccccatcttcgtcaccttctaccagtgcctggtgaccacgctgctgtgcaaaggcctcagcgctctggccgcctgctgccctggtgccgtggacttccccagcttgcgcctggacctcagggtggcccgcagcgtcctgcccctgtcggtggtcttcatcggcatgatcaccttcaataacctctgcctcaagtacgtcggtgtggccttctacaatgtgggccgctcactcaccaccgtcttcaacgtgctgctctcctacctgctgctcaagcagaccacctccttctatgccctgctcacctgcggtatcatcatcgggggcttctggcttggtgtggaccaggagggggcagaaggcaccctgtcgtggctgggcaccgtcttcggcgtgctggctagcctctgtgtctcgctcaacgccatctacaccacgaaggtgctcccggcggtggacggcagcatctggcgcctgactttctacaacaacgtcaacgcctgcatcctcttcctgcccctgctcctgctgctcggggagcttcaggccctgcgtgactttgcccagctgggcagtgcccacttctgggggatgatgacgctgggcggcctgtttggctttgccatcggctacgtgacaggactgcagatcaagttcaccagtccgctgacccacaatgtgtcgggcacggccaaggcctgtgcccagacagtgctggccgtgctctactacgaggagaccaagagcttcctctggtggacgagcaacatgatggtgctgggcggctcctccgcctacacctgggtcaggggctgggagatgaagaagactccggaggagcccagccccaaagacagcgagaagagcgccatgggggtgtgagcaccacaggcaccctggatggcccggccccggggcccgtacacaggcggggccagcacagtagtgaaggcggtctcctggaccccagaagcgtgctgtggtgtggactgggtgctacttatagacccaatcagaatacggtggttgagaaggaaccagtgtttacaagtaatatcagaaagttgaaggaaccagtgtttacaagtaataccagaaagttgccaaacccttctctatcctctcgtatttctgagtttttgtccttcccgagggagcaccctagtgagagttgaaccccttccttctgcctccagggcctgtctgcctccacatcactctgaggacagggacaggcaacaaccttgaagggacagcaatggcaaagccacaaaggcttcactgtactcaggggagatggccctaccacagccacctggagagggttgggaagccttccgtctgcggtgggcaggcagcctcaccctgggcccacagaccggccttcctttggaggaaagtgtggcctggactgagggaggaaatgagcgagttccctctgacaccagcagatccccaggggctgctgggcagtggcctgggaatggggtggattgtgagaaagtgctcaccatctatacaccctgtatgtccagcttttgaacacaagggaaccatgcttctcttagaggttaagcagggtcattaacatcctcccccagtccctaacatcacattgtcctgcgtggctcctctggccctgagtggcacctgtccctctggtctcccagcacctggcccaggtaacagccttctgaaagcagagccaaggagctgcttctctcttctcccagttctacctccccagaagccttcctccccaggtggggctgatggagcaagggtccagactaggagccttccaccccagctgtgtctggcgcccctagatctctgcaagggaggtgttacagctggttctgagccgcttgccttgtgatggtaagacaccaacctttacattcttccctgaggttgtggctgacagagcctgcttggccccactgttagtccagcgagctcctatatcaaaatgccgtaggccgggtggcttacaaacaacagaaacgtattgctcacagtcctggggggctgggacgcccaagatcaagaggccagcagattcggactccgctgagggctgtttcccgatccatagatggtgccttctcgctgtatcctcaatggtagaagcacaaacaagcaagctccttcctgcctcttttataaggactccaaccctgttcatgagggttccgcccccatgacccaatcagctccaaaggccccacctcctaatactgtcaccttgggggtgagaattccaatgtgaatttgcagggggagtgggggacacacacaaatttcggggccataccacccttcaccacaccctcctgcgctcagggtggcttgcagtccctggcccttctggtgggcatttggtatgtcctttctcttggggtgatttctgatgtttttactctatatagtgaaaagctagggagagcgggtcttctcccccctccctctccagtcccctcacaatcccagatgggttctaatgcagctgctggggcctgatgccctgagttgtttgtgattcaataaagaatccataagaaaaaaaaaaaaaaaaaaaaaaaaaaaaaaaaaaaaaaaaaaaa

SEQ ID NO: 170 - DNA, 4807 bp, Homo sapiens
aagtgcgcatgtgcgcgaggagtcgctcgggcacttattgagcgccgactgtctacgggcggccgggggtgatgggcagaggcttcagtgtccccttcgcctccgcaggagaggagaggcagcagcatggcgagtgtcctgtcccgacgccttggaaagcggtccctcctgggagcccgggtgttgggacccagtgcctcggaggggccctcggctgccccaccctcggagccactgctagaaggggccgctccccagcctttcaccacctctgatgacaccccctgccaggagcagcccaaggaagtccttaaggctcccagcacctcgggccttcagcaggtggcctttcagcctgggcagaaggtttatgtgtggtacgggggtcaagagtgcacaggactggtggagcagcacagctggatggagggtcaggtgaccgtctggctgctggagcagaagctgcaggtctgctgcagggtggaggaggtgtggctggcagagctgcagggcccctgtccccaggcaccacccctggagcccggagcccaggccctggcctacaggcccgtctccaggaacatcgatgtcccaaagaggaagtcggacgcagtggaaatggatgagatgatggcggccatggtgctgacgtccctgtcctgcagccctgttgtacagagtcctcccgggaccgaggccaacttctctgcttcccgtgcggcctgcgacccatggaaggagagtggtgacatctcggacagcggcagcagcactaccagcggtcactggagtgggagcagtggtgtctccaccccctcgcccccccacccccaggccagccccaagtatttgggggatgcttttggttctccccaaactgatcatggctttgagaccgatcctgaccctttcctgctggacgaaccagctccacgaaaaagaaagaactctgtgaaggtgatgtacaagtgcctgtggccaaactgtggcaaagttctgcgctccattgtgggcatcaaacgacacgtcaaagccctccatctgggggacacagtggactctgatcagttcaagcgggaggaggatttctactacacagaggtgcagctgaaggaggaatctgctgctgctgctgctgctgctgccgcaggcaccccagtccctgggactcccacctccgagccagctcccacccccagcatgactggcctgcctctgtctgctcttccaccacctctgcacaaagcccagtcctccggcccagaacatcctggcccggagtcctccctgccctcaggggctctcagcaagtcagctcctgggtccttctggcacattcaggcagatcatgcataccaggctctgccatccttccagatcccagtctcaccacacatctacaccagtgtcagctgggctgctgccccctccgccgcctgctctctctctccggtccggagccggtcgctaagcttcagcgagccccagcagccagcacctgcgatgaaatctcatctgatcgtcacttctccaccccgggcccagagtggtgccaggaaagcccgaggggaggctaagaagtgccgcaaggtgtatggcatcgagcaccgggaccagtggtgcacggcctgccggtggaagaaggcctgccagcgctttctggactgagctgtgctgcaggttctactctgttcctggccctgccggcagccactgacaagaggccagtgtgtcaccagccctcagcagaaaccgaaagagaaagaacggaaacacggagtttgggctctgttggctaaggtgtaacacttaaagcaattttctcccattgtgcgaacattttattttttaaaaaaaagaaacaaaaatatttttccccctaaaataggagagagccaaaactgaccaaggctattcagcagtgaaccagtgaccaaagaattaattaccctccgtttcccacatccccactctctaggggattagcttgtgcgtgtcaaaagaaggaacagctcgttctgcttcctgctgagtcggtgaattctttgctttctaaactcttccagaaaggactgtgagcaagatgaatttacttttcttaaaaaaaaaaaaaaaaaaaaaaaaaaagagtttctggctgatgggtgactcagagtgcaggactgcctggccgtggggcagaggggtttgcccttctcggagggtacctcctgttccctgtctgagcatcctgcatggaagtcaaaggaaatccctttcttggtgacgacttaaatctgggttccctcagacattgggttgcaccccaacaaatattaaatggcttcttcttaaagcccagagaaagaggttttttaaaagactgtcgccaaatagctgagccaaaaggctgatcagaattcactttttggaatgtggcagttaaacactaccttgatcattctctcctctttcctcgaggaactcctggagggtttgagcgtctggaaactctctgctctgacccgaggaagcaccctcctgacgccgccttcctccggttattgaaaggacgcctcagaaatgctttgttttcttttacgatgtattcagaagcctttactgattaaagttttcttttatttgggtggccgggagagacccagggaggttctggaggttcctttctgtctcctggccccaccagggatttccccatttctgtttgctgcctgaaagcaggatgaggaaggccaaggagagtccttgcacccgtgagcgtcaggatgaggaaatgacaggaggaagacgtgggtttgggttagtggctgctggcgttttggcccttggtgtttctggagcctccagggatctaggggagcctgggctgcgtgcatgtcgataagcagagctgttcttggggagaaggagggaggtctcgggagtgtagcaccatgccaaccagccctgcgcgaagacagagtgagccacgcccggatggcagggcatgtttctgttttggtgtctcactttcctcccagcgtgacttatttggggattcctcagggcctactggaatgtgactgcccactgcccagctgcctcgggtacaagtcctggccctatgtcccagctgtcaggggctcagggaatcctacccagccacctgtcctgggatggagtgtcagcatccaccccttggttgtcatcgaggccgccctcccagtcctgggtgaagatatttgggccaccagggctcccttggccccttcacgtaggaaatagacacgtgctttttaatgcaggacactttgagtgttacaaaatctgtagacctggcagtagggtcatgatgttgggaagggtgtagtgccctaggttggtgacagaagggacagacacttgtgcacaggtgtctttggtgatggggtttttttttttataacttagtaaaaaaaaaaaaatgtatgtggaattctgtctcttggtaaagctcaaagccaggctagcctgaggtggcgcagggctctccttcctgtcccttcgatctccttgagaattaagagctggcagctgctgatggtgtttcccaacccccctcacttcccaagacaacccccagcttcaggtcctcatggggaggggagggcacgttcttgacacatgggaacttcgctcaggagggcctccccttcccctctccctcagagttttcactgccgtctcgtctttagaaagctgtttgaattccccccgcccccagtttggaccgtgtagatataactggatatacggatttttctctttgtgcaggcttcttatgccgttggtatacagggcaggaaagagaggaataaagggagagagcagtgtggaaaccacggtggttttgctttgttcttactaggttttggtgccaccttccctgcctgcgcttgtgccccctctcctccttggcactggcggcctccttgcctcccttccacccgtgctgccatcccgtgcctgtcgtgttggttcttcacacgtgctctgttctcggggttgttccattcatgccttcttggagggtgagggtggcttgggaaccgacccagtgatcatgcctactttcttctttgtatctccctccttcccagcccacccgggcagcagactctgatggaaggaaggtgccgtaggtgggcttttagaaactaacgggactggttttcaaagcagttatcttgggaaactgtttattccagcgatgtgacttttttcagaatatttcttggaatcatattcagagtctggggctgtgtgttgagcagccttaaggatgctagacactcatttagtgcccagggagtccagcgaatgacgtctgtggccaagcgaggtctcaggtgcaaagcaaaaggaccatttaaagtaaaatagcttggattcaatcatgtgacttttaaattggctcagaaagcaattttgtaatttcagagagtgttttgagccatggccacgttgtcattgtgagtctatagcttgactccttggagaacaatattcatttggttgtggagactgatttgctgggagaaatctgtcctgttactttctggtcatcccaggttctgacttttaccaggggcaaaaaaaaaaaaagcaagagggagataaatcccatctgtgagtttgtcttattggcgcctttttcctcagctgtcttccaagtattatttttactgttaaaaaattttttaaaaatgtgaaatgtaatgtttttacagcaacaatatgaaatatattttataaggaataaaatggtaccttgtctgatttaaaaaaa

SEQ ID NO: 171 - DNA, 3140 bp, Homo sapiens
tcgggttctgcccggggacgcagcccagttggtagcgtcgctccctgagcgtttctaagggggccgcccggccttgtctttcggcagtggccgagccaccgccgcctgccgcgcgttccagagctgggcgctgcagctgcactgccgatcgccgtgtttggtcgatagaatccccagtgtgcccagagagtgcgacccctcgcccggcccggcgagccccgggcgtgaaccgagctgagggaggatggcagcctctggggtggagaagagcagcaagaagaagaccgagaagaaacttgctgctcgggaagaagctaaattgttggcgggtttcatgggcgtcatgaataacatgcggaaacagtgatttaaatctaccacccagctgtagttgaatctacaatctgctcagggatttatactcaatgccaatttgatatcatgctgggagggactgattgcagaaccttcttgacaagccacataaatctaaagaaaacgttgtgtgacgtgatcctcatggtccaggaaagaaagatacctgctcatcgtgttgttcttgctgcagccagtcatttttttaacttaatgttcacaactaacatgcttgaatcaaagtcctttgaagtagaactcaaagatgctgaacctgatattattgaacaactggtggaatttgcttatactgctagaatttccgtgaatagcaacaatgttcagtctttgttggatgcagcgaaccaatatcagattgaacctgtgaagaaaatgtgtgttgattttttgagagaacaagttgatgcttcaaattgtcttggtataagtgtgctagcggagtgtctagattgtcctgaattgaaagcaactgcagatgactttattcatcagcactttactgaagtttacaaaactgatgaatttcttcaacttgatgtcaagcgagtaacacatcttctcaaccaggacactctgactgtgagagcagaggatcaggtttatgatgctgcagtcaggtggttgaaatacgatgaacctaatcgccagccatttatggttgatatccttgctaaagtcaggtttcctcttatatcaaagaatttcttaagtaaaacggtacaagctgaaccacttattcaagacaatcctgaatgccttaagatggtgataagtggaatgaggtaccatctactgtctccagaggaccgagaagaacttgtagatggcacaagacctagaagaaagaaacatgactaccgcatagccctatttggaggctctcaaccacagtcttgtagatattttaacccaaaggattatagctggacagacatccgctgcccctttgaaaaacgaagagatgcagcatgcgtgttttgggacaatgtagtatacattttgggaggctctcagcttttcccaataaagcgaatggactgctataatgtagtgaaggatagctggtattcgaaactgggtcctccgacacctcgagacagccttgctgcatgtgctgcagaaggcaaaatttatacatctggaggttcagaagtaggaaactcagctctgtatttatttgagtgctatgatacgagaactgaaagctggcacacaaagcccagcatgctgacccagcgctgcagccatgggatggtggaagccaatggcctaatctatgtttgtggtggaagtttaggaaacaatgtttctgggagagtgcttaattcctgtgaagtttatgatcctgccacagaaacatggactgagctgtgtccaatgattgaagccaggaagaatcatgggctggtatttgtaaaagacaagatatttgctgtgggtggtcagaatggtttaggtggtctggacaatgtggaatattacgatattaagttgaacgaatggaagatggtctcaccaatgccatggaagggtgtaacagtgaaatgtgcagcagttggctctatagtttatgtcttggctggttttcagggtgttggtcgattaggacacattctcgaatataataccgaaacagacaaatgggttgccaactccaaagttcgtgcttttccagtcacaagttgtttaatttgtgttgtcgatacttgtggagcaaatgaagagacccttgaaacatgaaaaatgagtggacttcagactcatcagagactctaaaatatagccaccagtgctttgttccaggagtttggtgacaaagttttggtttggtgttttggtaaagaaagtttcaagtgaaatgaggttcctataaaatagatgtttcttttatatggatttccttaattcaaagatcatattttagctggccacaaaaccaagaacatatctagcaagaaaacttgaaaaagtataagcatttgttaaaaatgtgaatttcttgaatgaatttcacatttgtaactatgattttggcagaatagaagattggctcatcagtgaagcgcagtatcttagctctagattctattttcatgcatcacagaagtgctatacggttaggtctgtttgtgctcagtcaagaactaagaaatagtatgaattgtaagtcaagatgggcaactcagatggagcagcttagtctcacagtttgcttgtctatttattttatttagtgccaaatgtattccattttaaaagtaagccagagtgagtcaaggcatatacacactttctcacaaaacttcctaaacagatttgggggtttaatatgtccaactcctcatgaaatatattcaatccacttaaatatattccatctttttaacataaaatgtaaagcttagcacccatcattaatttatgtctctgttttatccagtggttaaaaaaggattctgcctctttagtcctcactgttaaataaaacccaatcatagtaagtgattaactagcaaaaagtaaagctatttatagcaaatttctagatcattagaaaagcactggtagttgtacaatatcagtgttgactttgaacttctttaacgagatcatgaattcttttcccttagccaaaacatgaaatatttaacctagttgtctctaaaagttttgtaatcatgagttagatatatgtcatctcctattcattgcttttatgtgatcaataaatcttttacaaaccc

SEQ ID NO: 172 - DNA, 4193 bp, Homo sapiens
agaccggcgcgtgaggaacctaccggtaccggccgcgcgctggtagtcgccggtgtggctgcacctcaccaatcccgtgcgccgcggctgggccgtcggagagtgcgtgtgcttctctcctgcacgcggtgcttgggctcggccaggcggggtccgccgccagggtttgaggatgggggagtagctacaggaagcgaccccgcgatggcaaggtatatttttgtggaatgaaaaggaagtattagaaatgagctgaagaccattcacagattaatatttttggggacagatttgtgatgcttgattcacccttgaagtaatgtagacagaagttctcaaatttgcatattacatcaactggaaccagcagtgaatcttaatgttcacttaaatcagaacttgcataagaaagagaatgggagtctggttaaataaagatgactatatcagagacttgaaaaggatcattctctgttttctgatagtgtatatggccattttagtgggcacagatcaggatttttacagtttacttggagtgtccaaaactgcaagcagtagagaaataagacaagctttcaagaaattggcattgaagttacatcctgataaaaacccgaataacccaaatgcacatggcgattttttaaaaataaatagagcatatgaagtactcaaagatgaagatctacggaaaaagtatgacaaatatggagaaaagggacttgaggataatcaaggtggccagtatgaaagctggaactattatcgttatgattttggtatttatgatgatgatcctgaaatcataacattggaaagaagagaatttgatgctgctgttaattctggagaactgtggtttgtaaatttttactccccaggctgttcacactgccatgatttagctcccacatggagagactttgctaaagaagtggatgggttacttcgaattggagctgttaactgtggtgatgatagaatgctttgccgaatgaaaggagtcaacagctatcccagcctcttcatttttcggtctggaatggccccagtgaaatatcatggagacagatcaaaggagagtttagtgagttttgcaatgcagcatgttagaagtacagtgacagaactttggacaggaaattttgtcaactccatacaaactgcctttgctgctggtattggctggctgatcactttttgttcaaaaggaggagattgtttgacttcacagacacgactcaggcttagtggcatgttggatggtcttgttaatgtaggatggatggactgtgccacccaggataacctttgtaaaagcttagatattacaacaagtactactgcttattttcctcctggagccactttaaataacaaagagaaaaacagtattttgtttctcaactcattggatgctaaagaaatatatttggaagtaatacataatcttccagattttgaactactttcggcaaacacactagaggatcgtttggctcatcatcggtggctgttattttttcattttggaaaaaatgaaaattcaaatgatcctgagctgaaaaaactaaaaactctacttaaaaatgatcatattcaagttggcaggtttgactgttcctctgcaccagacatctgtagtaatctgtatgtttttcagccgtctctagcagtatttaaaggacaaggaaccaaagaatatgaaattcatcatggaaagaagattctatatgatatacttgcctttgccaaagaaagtgtgaattctcatgttaccacgcttggacctcaaaattttcctgccaatgacaaagaaccatggcttgttgatttctttgccccctggtgtccaccatgtcgagctttactaccagagttacgaagagcatcaaatcttctttatggtcagcttaagtttggtacactagattgtacagttcatgagggactctgtaacatgtataacattcaggcttatccaacgacagtggtattcaaccagtccaacattcatgagtatgaaggacatcactctgctgaacaaatcttggagttcatagaggatcttatgaatccttcagtggtctcccttacacccaccaccttcaacgaactagttacacaaagaaaacacaacgaagtctggatggttgatttctattctccgtggtgtcatccttgccaagtcttaatgccagaatggaaaagaatggcccggacattaactggactgatcaacgtgggcagtatagattgccaacagtatcattctttttgtgcccaggaaaacgttcaaagataccctgagataagattttttcccccaaaatcaaataaagcttatcattatcacagttacaatggttggaatagggatgcttattccctgagaatctggggtctaggatttttacctcaagtatccacagatctaacacctcagactttcagtgaaaaagttctacaagggaaaaatcattgggtgattgatttctatgctccttggtgtggaccttgccagaattttgctccagaatttgagctcttggctaggatgattaaaggaaaagtgaaagctggaaaagtagactgtcaggcttatgctcagacatgccagaaagctgggatcagggcctatccaactgttaaattttatttctacgaaagagcaaagagaaattttcaagaagagcagataaataccagagatgcaaaagcaatcgctgccttaataagtgaaaaattggaaactctccgaaatcaaggcaagaggaataaggatgaactttgataatgttgaagatgaagaaaaagtttaaaagaaattctgacagatgacatcagaagacacctatttagaatgttacatttatgatgggaatgaatgaacattatcttagacttgcagttgtactgccagaattatctacagcactggtgtaaaagaagggtctgcaaactttttctgtaaagggccggtttataaatattttagactttgcaggctataatatatggttcacacatgagaacaagaatagagtcatcatgtattctttgttatttgcttttaacaacctttaaaaaatattaaaacgattcttagctcagagccatacaaaagtaggctggattcagtccatggaccatagattgctgtccccctcgacggacttataatgtttcaggtggctggcttgaacatgagtctgctgtgctatctacataaatgtctaagttgtataaagtccactttcccttcacgttttttggctgacctgaaaagaggtaacttagtttttggtcacttgttctcctaaaaatgctatccctaaccatatatttatatttcgttttaaaaacacccatgatgtggcacagtaaacaaaccctgttatgctgtattattatgaggagattcttcattgttttctttccttctcaaaggttgaaaaaatgcttttaatttttcacagccgagaaacagtgcagcagtatatgtgcacacagtaagtacacaaatttgagcaacagtaagtgcacaaattctgtagtttgccgtatcatccaggaaaacctgagggaaaaaaattatagcaattaactgggcattgtagagtatcctaaatatgttatcaagtatttagagttctatattttaaagatatatgtgttcatgtattttctgaaattgctttcatagaaattttcccactgatagttgatttttgaggcatctaatatttacatatttgccttctgaactttgttttgacctgtatcctttatttacattgggtttttctttcgtagttttggtttttcactcctgtccagtctatttattattcaaataggaaaaattactttacaggttgttttactgtagcttataatgatactgtagttattccagttactagtttactgtcagagggctgcctttttcagataaatattgacataataactgaagttatttttataagaaaatcaagtatataaatctaggaaagggatcttctagtttctgtgttgtttagactcaaagaatcacaaatttgtcagtaacatgtagttgtttagttataattcagagtgtacagaatggtaaaaattccaatcagtcaaaagaggtcaatgaattaaaaggcttgcaactttttcaaaaacctgttagaatatgc

SEQ ID NO: 173 - DNA, 1268 bp, Homo sapiens
aagaaacaagctgggcagctctgggagagaggagtgtcagacagctgttgtcaacaggcacctggccagagtgaaaaggaggggcagattccatccaagtcccagcggcgccagctgacactctctgccaatgcccaggtgctgagcgacagtgtcccaccggtccctgtgcccagaatggcctgcaccaagaccctgcaacagtcccagcccatctccgcaggagccaccacaaccaccaccgctgtggcccctgctgggggtcattctggctccacagaatgtgacctggagtgtctggtgtgccgggagccctacagctgtccccggttgcccaagctgctggcctgccagcatgccttctgcgccatctgcctgaagctcctgctgtgcgtgcaggacaacacctggtccatcacctgcccgctgtgccgcaaggtcaccgccgtccccgggggcctcatctgcagcctgcgcgaccatgaggcggtggtggggcagctggcccagccatgcacagaggtatcgctctgtcctcaggggctggtggatcctgctgacttggcagcaggacaccccagcttggtgggagaggatggacaggatgaagtaagtgcaaaccacgtggcagcccggcgcctggccgcgcacctactcctgctggccttgctcattatcctcatcgggcccttcatctacccgggtgtcttacgatgggtgctcaccttcatcatcgccctggccctgctgatgtccaccctcttctgctgtctccccagcacccggggcagctgctggccctcctccaggactctcttctgcagagagcagaaacacagccacatctcttccattgcctgagtgccctctgatgaggctatccctgcagccctttctgcccttgggcccccggacttccacaatgaacagggtaaggggttacggactaagactggctcctttgggaaatcacatgccagcgggacttgcaagccacaaccgagatggccagcctgggtcaagaattacacgcttggatgacaggcttgcacttgcccttgggatagcatagctaaaactgttggtggctaggggagcagacacaaactacttgaacatgacaagatgggggaagctcctgttcctcttattccaatgttcttggtttttctttatataacttgatgaaagtattgcagtattgatgccattgtagaatagaactggaattccattctttttgcaatttaaaaaaaaaaaaaaaaaaa

SEQ ID NO: 174 - DNA, 3383 bp, Homo sapiens
gctgcgcgcaggccgggaacacgaggccaagagccgcagccccagccgccttggtgcagcgtacaccggcactagcccgcttgcagccccaggattagacagaagacgcgtcctcggcgcggtcgccgcccagccgtagtcacctggattacctacagcggcagctgcagcggagccagcgagaaggccaaaggggagcagcgtcccgagaggagcgcctcttttcagggaccccgccggctggcggacgcgcgggaaagcggcgtcgcgaacagagccagattgagggcccgcgggtggagagagcgacgcccgaggggatggcggcagcgtcccggagcgcctctggctgggcgctactgctgctggtggcactttggcagcagcgcgcggccggctccggcgtcttccagctgcagctgcaggagttcatcaacgagcgcggcgtactggccagtgggcggccttgcgagcccggctgccggactttcttccgcgtctgccttaagcacttccaggcggtcgtctcgcccggaccctgcaccttcgggaccgtctccacgccggtattgggcaccaactccttcgctgtccgggacgacagtagcggcggggggcgcaaccctctccaactgcccttcaatttcacctggccgggtaccttctcgctcatcatcgaagcttggcacgcgccaggagacgacctgcggccagaggccttgccaccagatgcactcatcagcaagatcgccatccagggctccctagctgtgggtcagaactggttattggatgagcaaaccagcaccctcacaaggctgcgctactcttaccgggtcatctgcagtgacaactactatggagacaactgctcccgcctgtgcaagaagcgcaatgaccacttcggccactatgtgtgccagccagatggcaacttgtcctgcctgcccggttggactggggaatattgccaacagcctatctgtctttcgggctgtcatgaacagaatggctactgcagcaagccagcagagtgcctctgccgcccaggctggcagggccggctgtgtaacgaatgcatcccccacaatggctgtcgccacggcacctgcagcactccctggcaatgtacttgtgatgagggctggggaggcctgttttgtgaccaagatctcaactactgcacccaccactccccatgcaagaatggggcaacgtgctccaacagtgggcagcgaagctacacctgcacctgtcgcccaggctacactggtgtggactgtgagctggagctcagcgagtgtgacagcaacccctgtcgcaatggaggcagctgtaaggaccaggaggatggctaccactgcctgtgtcctccgggctactatggcctgcattgtgaacacagcaccttgagctgcgccgactccccctgcttcaatgggggctcctgccgggagcgcaaccagggggccaactatgcttgtgaatgtccccccaacttcaccggctccaactgcgagaagaaagtggacaggtgcaccagcaacccctgtgccaacgggggacagtgcctgaaccgaggtccaagccgcatgtgccgctgccgtcctggattcacgggcacctactgtgaactccacgtcagcgactgtgcccgtaacccttgcgcccacggtggcacttgccatgacctggagaatgggctcatgtgcacctgccctgccggcttctctggccgacgctgtgaggtgcggacatccatcgatgcctgtgcctcgagtccctgcttcaacagggccacctgctacaccgacctctccacagacacctttgtgtgcaactgcccttatggctttgtgggcagccgctgcgagttccccgtgggcttgccgcccagcttcccctgggtggccgtctcgctgggtgtggggctggcagtgctgctggtactgctgggcatggtggcagtggctgtgcggcagctgcggcttcgacggccggacgacggcagcagggaagccatgaacaacttgtcggacttccagaaggacaacctgattcctgccgcccagcttaaaaacacaaaccagaagaaggagctggaagtggactgtggcctggacaagtccaactgtggcaaacagcaaaaccacacattggactataatctggccccagggcccctggggcgggggaccatgccaggaaagtttccccacagtgacaagagcttaggagagaaggcgccactgcggttacacagtgaaaagccagagtgtcggatatcagcgatatgctcccccagggactccatgtaccagtctgtgtgtttgatatcagaggagaggaatgaatgtgtcattgccacggaggtataaggcaggagcctacctggacatccctgctcagccccgcggctggaccttccttctgcattgtttacattgcatcctggatgggacgtttttcatatgcaacgtgctgctctcaggaggaggagggaatggcaggaaccggacagactgtgaacttgccaagagatgcaatacccttccacacctttgggtgtctgtctggcatcagattggcagctgcaccaaccagaggaacagaagagaagagagatgccactgggcactgccctgccagtagtggccttcagggggctccttccggggctccggcctgttttccagagagagtggcagtagccccatggggcccggagctgctgtggcctccactggcatccgtgtttccaaaagtgcctttggcccaggctccacggcgacagttgggcccaaatcagaaaggagagagggggccaatgagggcagggcctcctgtgggctggaaaaccactgggtgcgtctcttgctggggtttgccctggaggtgaggtgagtgctcgagggaggggagtgctttctgccccatgcctccaactactgtatgcaggcctggctctctggtctaggccctttgggcaagaatgtccgtctacccggcttccaccaccctctggccctgggcttctgtaagcagacaggcagagggcctgcccctcccaccagccaagggtgccaggcctaactggggcactcagggcagtgtgttggaaattccactgagggggaaatcaggtgctgcggccgcctgggccctttcctccctcaagcccatctccacaacctcgagcctgggctctggtccactactgccccagaccaccctcaaagctggtcttcagaaatcaataatatgagtttttattttgtttttttttttttttttgtagtttattttggagtctagtatttcaataatttaagaatcagaagcactgacctttctacattttataacattattttgtatataat

SEQ ID NO: 175 - DNA, 1332 bp, Homo sapiens
gggtgctatagacgcacaaacgaccgcgagccacaaatcaagcacacatatcaaaaaacaaatgagctcttattttgtaaactcattttgcggtcgctatccaaatggcccggactaccagttgcataattatggagatcatagttccgtgagcgagcaattcagggactcggcgagcatgcactccggcaggtacggctacggctacaatggcatggatctcagcgtcggccgctcgggctccggccactttggctccggagagcgcgcccgcagctacgctgccagcgccagcgcggcgcccgccgagcccaggtacagccagccggccacgtccacgcactctcctcagcccgatccgctgccctgctccgccgtggccccctcgcccggcagcgacagccaccacggcgggaaaaactccctaagcaactccagcggcgcctcggccgacgccggcagcacccacatcagcagcagagagggggttggcacggcgtccggagccgaggaggacgcccctgccagcagcgagcaggcgagtgcgcagagcgagccgagcccggcgccgcccgcccaaccccagatctacccctggatgcgcaagctgcacataagtcatgacaacataggcggcccggaaggcaaaagggcccggacggcctacacgcgctaccagaccctggagctggagaaggagttccacttcaaccgttacctgacccgcagaaggaggattgaaatagcacatgctctttgcctctccgagagacaaattaaaatctggttccaaaaccggagaatgaagtggaaaaaagataataagctgaaaagcatgagcatggccgcggcaggaggggccttccgtccctgagtatctgagcgtttaaagtactgagcagtattagcggatcccgcgtagtgtcagtactaaggtgactttctgaaactcccttgtgttccttctgtgaagaagccctgttctcgttgccctaattcatcttttaatcatgagcctgtttattgccattatagcgcctgtataagtagatctgctttctgttcatctctttgtcctgaatggctttgtcttgaaaaaaaatagatgttttaacttatttatatgaagcaagctgtgttacttgaagtaactataacaaaaaaagaaaagagaaaaaaaaacacacaaaaagtcccccttcaatctcgtttagtgccaatgttgtgtgttgcactcaagttgtttaactgtgcatgtgcgtggaagtgttcctgtctcaatagctccaagctgttaaagatatttttattcaaactacctatattccttgt

SEQ ID NO: 176 - DNA, 3398 bp, Homo sapiens
gttagcaaccagaggcttctaaacaacctaccctccttccccattttctgtggtccaactaccctcggcgatcccaggcttggcggggcaccgcctggcctctcccgttcctttaggctgccgccgctgcctgccgccatggcagagttgggcctaaatgagcaccatcaaaatgaagttattaattatatgcgttttgctcgttcaaagagaggcttgagactcaaaactgtagattcctgcttccaagacctcaaggagagcaggctggtggaggacaccttcaccatagatgaagtctctgaagtcctcaatggattacaagctgtggttcatagtgaggtggaatctgagctcatcaacactgcctataccaatgtgttacttctgcgacagctgtttgcacaagctgagaagtggtatcttaagctacagacagacatctctgaacttgaaaaccgagaattattagaacaagttgcagaatttgaaaaagcagagattacatcttcaaacaaaaagcccatcttagatgtcacaaagccaaaacttgctccacttaatgaaggtggaacagcagaactcctaaacaaggaaattttaagacttcaagaagagaatgagaaattgaagtcaaggttgaagaccattgaaatacaggctacaaatgcactggatgaaaagtcaaaactagaaaaagcactgcaagatttacagcttgatcaaggaaatcaaaaggattttataaaggcccaagacttaagtaacttagaaaacactgtcgctgccttaaagagtgagtttcagaagacacttaatgacaagacagaaaaccagaagtcactggaggagaatctggcgacagccaagcacgatctactcagggttcaggagcagctgcacatggctgaaaaggaattagaaaagaaatttcagcaaacagcagcttatcgaaacatgaaagagattcttaccaagaagaatgaccaaatcaaagatctgaggaaaagactggcacaatatgaacctgaagattaaaactgaagatttcctctggaagctaccacatgcaaacatacaagcagtctcacctcaggcatgtattttgaaaagcattttgtcatatcccctctccttatttttctaatatttagactttgaatatttagaactagagttcctattttcagctagttgaaaacagagaaaacctagtgattctgtctggtcatcccacacacctctctactgagtgctccagagtcttagctcacatgcactgagaattctttacagcaaagaagagatttttagagtgggaagaagaggcttatccttctgcattagtataaagagtctgtatttttaataaatgttaaataagctaacaatgtttgtacttatgcattccccatgggtaaaaataaataatagcattgttaaagatagttattaccaaaaaaagagagttattacaaataaatatgtctctttatttttaaaaatgaaatcttaattcatttactctatttgatgataaactataaattcattgaaaatgtgaattctattatgggtagcctttttaccaattataaggaaaatttacagcagtgaacatgaacattcacttagcttcctcagtctctccatcttaaagatcatttatcagaggaggttcagcattttttgcagcataacttttcatgagtctgtattactaatggataagtcaaatccatcctgcacttctacagtttagaaagtatctggactcagaataaatgtaatatttatacttgtttccagaatgttattttacattttatgttcaataagaacactttttaaaagacgtatattcaacataaaatcagctatcagacttcagattagactttatttatgtgggtctataataattgtattttcaagaggttttcactatatttgtattggcctggttttctcagacgattttggacaaatcattagaaactgggcatcatatccacagttatgtaaggcagtgatatactataaggataaacaaagtcaagtccataaagcaataatccctcagaaggaaagtccttacttttcacatattaatatttagtaatttttcctgcttctaaaagtgagagtatcacaccctaaatgaacactgtctactaagagacatcattccatttccacaaatgaagattttattccaagaaacgagtttactgattggagcatagggcttgttgttatttttattcaagcttttagtaatagccttgaatttattatttttcttataggctttttgttaaaatagtgaaggaacaaatgttaaagggtaagataatttccctgcaaaaggacacagaaggcagtcttaagaagatgaatggatgagagaagggagagaataaaatgcaataacgagccagcatttactatgtattttctcctcacctgtctctccatatttaggtcacttaccagtttctgtgcccttttggagcttttgttgagggcttcattctcaccctgtatttctttagccctaaattgacactctctccaaaaatccattccattgtctgtggaccaagatgttctatgtaattcagaagcagaactcttggctaaagggctagtgtggccttcagaaaccattcaattattttctccctacacctttgtcagtttgaaaccagtgaggaaaaaaggtatgttgataagaaacctatattgctaggtagaatttgtacttgttttcttggtagcagttttgaaatattctgtacagtacgttcctattgtttaataataaattcaaaaatatttctaaaaccttaaaaccaactatgccaagcattaagataaacaaatatgatgttctttgacgtaaatcaacgtgatgattctttcacatgtaaacacattttagtgtttctggtttgtcatttttgttgttgttgttgttgttgttatttactctataccctttagcaaaatacagttttaaatttttattgtttttagtagtttcccaactttaagacttatctaatttaactgagaaagaaagcctttttcatatatatatatattggatttctaaggatggtggtttgagccttgattagacttttgatgtgctaagccagacaggcagtctgtacattgatggccatcacaatgcagctttggtttaatttaattcaggcctgctgctgagttatgcacagactttttgttgaccaaaataaaatataaagggttttcttctgtttgacatttgtgttcattttttctctttatgtattacattttaacctatattaaataaatgtttaaatgataatttgcttatgtcttataaaactcagcataagaaaaat

SEQ ID NO: 177 - DNA, 1528 bp, Homo sapiens
ccggctcccattccggctccagcctccaatccgacccccatttcggctgcagcctcggacctagctccggccctcggtctatccggttgcatcctccctccctgttccggatcttatcttgcgccagcgcctactccaggatcccgtagccagacctcaagccatggctggtcccttctcccgtctgctgtccgcccgcccgggactcaggctcctggctttggccggagcggggtctctagccgctgggtttctgctccgaccggaacctgtacgagctgccagtgaacgacggaggctgtatcccccgagcgctgagtacccagacctccgaaagcacaacaactgcatggccagtcacctgaccccagcagtctatgcacggctctgcgacaagaccacacccactggttggacgctagatcagtgtatccagactggcgtggacaaccctggccaccccttcatcaagactgtgggcatggtggctggagatgaggagacctatgaggtatttgctgacctgtttgaccctgtgatccaagagcgacacaatggatatgacccccggacaatgaagcacaccacggatctagatgccagtaaaatccgttctggctactttgatgagaggtatgtattgtcctctagagtcagaactggccgaagcatccgaggactcagtctgcctccagcttgcactcgagcagagcgacgagaggtggaacgtgttgtggtggatgcactgagtggcctgaagggtgacctggctggacgttactataggctcagtgagatgacagaggctgaacagcagcagcttattgatgaccactttctgtttgataagcctgtgtccccgttgctgactgcagcaggaatggctcgagactggccagatgctcgtggaatttggcacaacaatgagaagagcttcctgatctgggtgaatgaggaggatcatacacgggtgatctccatggagaagggtggtaacatgaagagagtgtttgaaagattctgccgaggcctcaaagaggtggagagacttatccaagaacgtggctgggagttcatgtggaatgagcgtttgggatacatcttgacctgtccatctaacctgggcactggacttcgggcaggagtgcacatcaaactgcccctgctaagcaaagatagccgcttcccaaagatcctggagaacctaagactccaaaaacgtggtactggaggagtggacactgctgctacaggcggtgtctttgatatttctaatttggaccgactaggcaaatcagaggtggagctggtgcaactggtcatcgatggagtaaactatttgattgattgtgaacggcgtctggagagaggccaggatatccgcatccccacacctgtcatccacaccaagcattaactccccatcgccagctgatgactcaagattcccaggagttttgctcattctaatgatggcccattctacttgctctggacctgcccccgcatcccctgcctccatcctagt

SEQ ID NO: 178 - DNA, 3302 bp, Homo sapiens
acgtccccgccgggcccgcgcgcctcgtgcctcgcgcctcgcgcctccagccacgtccccgccccggctccggcgcgccgcggagttggctgctgggaggtgcgggactgggtgtggccggcggctctggtctcggctgtgagctgcgctctccacgccggctccgcgctccaggggctgctgagcgcccagcggacaccggcagcgcgcggtcgacgcgggcctgagctccctccagctgttttcactcattagctcctgaggtaaacaaattgaaaaaatgagcgaactggaacagttgaggcaagaagcagaacaactgcggaatcagattcaggatgctcggaaagcatgtaatgatgcaacgcttgttcagattacatcaaatatggactctgtgggtcgaatacaaatgcgaacaagacgtacactgaggggccacctagctaaaatctatgctatgcattggggatacgattccaggctgctagtcagtgcttctcaagatggaaaattaattatttgggatagctatacaacaaataagatgcatgctattcctttgaggtcctcctgggtgatgacctgtgcttatgctccctctggtaattatgttgcctgtggaggcttggacaacatctgctctatatataacttaaagaccagagagggaaatgtgagagtaagccgagagttgccaggtcacacagggtacttgtcctgctgtcgttttttagatgacagccaaattgttacaagttcaggagatacaacttgtgctttatgggacatcgaaactgcccagcagaccaccacattcactgggcattctggagatgtgatgagtctttctttgagtcctgacatgaggacttttgtttctggtgcttgtgatgcctcttccaaattatgggatattcgagatggaatgtgtagacagtctttcacgggacatgtctcagatatcaatgctgtcagttttttcccaaatggatatgccttcgccactggctctgatgatgccacttgccggctctttgaccttcgtgcagatcaagagttattattgtattctcatgacaatatcatctgtggaatcacttctgtagccttctcaaaaagtgggcgtctcttgttggctggttacgatgactttaattgtaatgtatgggacacgctaaaaggagatcgtgcaggtgtccttgctggtcatgacaaccgtgtgagctgcttaggtgtaactgatgatggcatggctgtggcaacaggctcttgggacagttttcttagaatctggaattaacagtgtcatacatatttgttctccattgatatatctggagaaatcaatgctacagcctatagctgtgaaaaaattctaccttatatttgcaggtgaagatttttctattagattatctacaaaaacaagctttcagtaaactaccaaaaaaaaagtgggggtggaggaaaaaaggcaaaggcgccttctgagatcaaaaggaccagtgtattaatttgaggggttgggttattttaaccttggtgaattgttgtgtgtactcagagtgtattttctttgtgtagaacagaatgtacacattatagcagctcgccattgtgtttgcattttttaagaagtacatttttaactttgtatacacaagaaatgtcatatttttgagttttgtaatggaagaaccaggcacagaaacagacagaaatgatactgtatgtgtgtgtatttatgtctgaagaaagtccccttgaattctgatatctctttgaatctaagagatcctgatagcttcatgtttaagagcattgacaggtggggcacctctgaggggagttcattgtttctcatgcatcatttgccatatactattaatcaaagtgcttgctttcagtcctttgaggggacagataatctgaaggccagagattagagatttcactgatattttggacatacataagaaacatcattataattaataaaaagtaggtaatagcatataaatggttcttgacattttaaaagcctggttatgatcagttgacactttgagtacccccctaaatagctggactttccttttcatttcatatttggaactaagtttgtagcgtatactcatctttcagaagtttggtaaacattgggattgtccctgcatctgaacatctttcccagtgctatcagtatacatctagagaggaaatgcaatgtgacagtgttacatttggagagaagtgtgaaatctaaccaatcgctagcacatatttgttgtaatacggtggtttatttcatgtttgcatactataaaatctgaattgatgtgaaatatctgtgcctttaaatttcttaaacctttaagctttttgttctgttttgcaacattttgtagtatttcttcccttccttagcacaaaatactggtttctaagtggttttgcttcaaaggatgtctagatgtaagtgattccacttaaagccaaaataaaaattcctaaagcagttcttaaaggagttagagagctatattaaacagtttttctgtggtataataatgtgtctcttactagaagtcccccacgaccaagttaaagatacttttcctgttggattctcttttacaaataagtctaaatgactgataatagaagattgttagtcttgcttgatggtaaagtcttggattattctgatatatagacgtgcattgttttgtaacttagttacttttcagataggtctgtgttaacttttgaacatgtgtaacttaacctaaatactcccaaactttacctctaaatttttgtttttatgttgtgaatgtgctaatatgtgcatcaactgtaaagatgtatcagttttattaaaatcagttgacaattagaataataaagtggataaaggcaaattaagatataggaccaaaacagaatattgtagatggcagttatgaatgtatatttatattttgattaagatttctattaactttttggctgggcagagtggcttacacctataatcccagcaatttgggaggccaaggtgggcagatcacttgaggtcaggagttcgcgaccagcctacccaacatggtgaaaccccatctcttctaaaaatacaaacattagccgggcgtggtggcacattcctgtaatcccagctactcgggaggctgaggcaggagattcgcctgaacccgggaggcagaggttgcagtgagccgagattgtgccactgcactccagcctaggcgacagagtgagactccatctcaaattgg

SEQ ID NO: 179 - DNA, 4272 bp, Homo sapiens
aagaggttgggcggatgttgtgagccgggtcgctgcggccgaggctccggcccccaggaccactggctgcccatgagagatgaaggatggcatccaagggggccggcatgtctttctcccgcaagagctataggctgacctcagatgctgagaaatccagggtcacaggcattgtgcaggagaagctgctgaatgactacctgaaccgcatcttttcctcttctgaacatgcacccccagcagccaccagcaggaaacccctgaacttccagaacctgccagaacatttggaccagttgctacaggtggacaatgaggaggaggaaagccagggacaggttgaagggcggcttggcccatccactgtggtcctggaccacacaggcggctttgaggggcttctcctggtggatgatgacctgctgggggtgattggacacagcaactttggcaccatccgctctaccacatgcgtgtacaaagggaaatggctctacgaggtcctcatctcctcccaggggctcatgcagatcggctggtgcaccatcagctgccgcttcaaccaggaggagggggttggagatacacacaactcctatgcctatgatggcaaccgcgtgcgcaagtggaatgtgaccacaacgaattatggcaaggcgtgggcagcgggggacatcgtgagctgcctgattgacctggatgatggcactctgtccttctgcctgaacggtgtatcactgggcactgcctttgagaacctgtccaggggcctgggtatggcctacttcccagccatcagcctctctttcaaggagtccgtggccttcaactttggcagccgtcctctgcgctacccagtggcaggctaccggcccctgcaggacccaccgagtgctgacctggtgcgggcacagaggttgctgggctgcttccgggcagtgctgagtgtggagctggaccctgtggaggggcggctgttggacaaggagagctccaagtggcggttgcggggccagcccaccgtcctcctcacactggcccacatcttccatcactttgcaccgcttctgcgcaaggtgtatctggtggaggctgtgctcatgagcttcttgctgggcatcgtggagaagggcacacccacacaggcacagtccgtggtgcaccaggtcctggacctcttgtggctcttcatggaggactacgaggtacaagattgcctcaagcagttgatgatgtctctgcttcggctgtaccgattctcacccattgtcccagacctgggcctacagatccattacctgcggctcactatcgccatcctgaggcatgagaagtcccgcaagtttctgcttagcaatgtcctcttcgacgtgctccgctccgtcgtcttcttttacatcaagagccccctgcgtgtggaggaggccggcctgcaggagctcattcccaccacctggtggccccactgctccagtagggagggcaaagagagcacggagatgaaggaggagaccgcagaggagcggctgcggcggcgagcctacgaacggggctgtcagcggctcaggaagcgcatcgaagtggtggaagaactacaggtccagatcctgaagctgctgctggacaataaagatgacaatgggggtgaagcttctaggtatatcttcctgaccaagtttcgcaagtttctgcaggagaacgccagtggccgggggaacatgcccatgctctgcccccctgagtacatggtctgcttcttacaccggctgatctctgccctgcgctactattgggatgaatacaaggcttccaatcctcatgcttccttcagtgaggaggcctacatcccgccccaggtcttctataatggcaaggtggactactttgacctgcagcgcctggggggcctcctctcgcacctgcggaagaccctcaaagatgaccttgcttccaaagccaacattgtgatcgacccactggagctccagtcaaccgccatggatgacctagatgaggatgaggagccagccccagctatggcccagcgccccatgcaggccctggctgttggggggccactgcccctgccccggcccggctggctcagttctccaactttgggccgagccaaccgcttcctcagcacagcggctgtgagcctcatgaccccacggcggcctctgagcacctcggagaaagtgaaggtccgcacgctgagcgtggagcagaggacccgtgaggacattgaaggcagccactggaatgagggcttgctgctggggcggccccccgaggagcctgagcagcccctcaccgagaactcgctgctggaagtcctggatggggcggtcatgatgtacaacctcagcgtacaccagcagctgggcaagatggtgggtgtctccgatgatgtcaatgaatacgctatggctctgagggacacagaggacaagctccgccggtgccccaagaggaggaaggacatccttgcagagttgaccaagagccagaaggttttctcagaaaagctggaccacctgagccgccgtcttgcctgggtccatgccactgtctactcccaggagaagatgctggacatctactggctgctgcgcgtctgcctgcggaccattgagcacggtgatcgcacagggtctctctttgccttcatgcccgagttctacctgagcgtggccatcaacagctacagtgctctcaagaattactttggtcccgtgcacagcatggaggagctcccaggctatgaagagaccctgacccgcctggctgccattctcgccaaacactttgccgacgcacgcattgtgggcactgacatccgagactcactgatgcaggccctggccagctacgtgtgctacccacactccctgcgggctgtggagcgaatccccgaggagcagcgtatcgccatggtgaggaacctcctggcgccctatgagcagcggccctgggcccagaccaactggatcctggtgcggctctggaggggctgtggcttcgggtaccgctatacacggctgccacatctgctgaaaaccaaacttgaggacgccaatttgcccagcctccagaagccctgcccttccaccctgctgcagcagcacatggcggacctcctacagcagggtcctgatgtggcacccagcttcctcaacagcgtcctcaatcagctcaactgggccttctctgaattcattggcatgatccaagagatccagcaggctgctgagcgcctggagcggaactttgtggacagccggcagctcaaggtatgtgccacctgctttgacctctcggtcagcctgctgcgtgtcttggagatgactatcacactggtgcctgagatattccttgactggacccggcctacctctgagatgctgctgcggcgtcttgcacagctgctaaaccaggtgctgaaccgggtgacagctgagaggaacctgtttgatcgtgtggtcaccctacggctgcctggcctagagagcgtggaccactatcccattctggtggcagtgacgggcatcctggtgcagctcctggtgcgtggcccagcctcagagagagagcaagccacatcagtgctcctggcagatccctgcttccagctacgctcaatatgctatctcctgggacagccagagcccccagcacctggcactgctctgccagcccctgaccggaagcgcttctccctgcagagctatgcggattatatcagtgccgatgagctggcccaagtggaacagatgctggcgcacctgacctctgcatctgcccaggcagcagctgcctccctgcccaccagtgaggaggacctctgccccatctgctatgcccaccccatctctgctgtgttccagccctgtggccacaagtcctgcaaagcctgtatcaaccagcacctgatgaacaacaaggactgcttcttctgcaaaaccaccatcgtgtctgtagaggactgggagaagggagccaatacgagtactacctcctcagctgcctagccctcacagcctgtgccatcctggaacctccacctttgaacccagagccaggctgggccctatttatgagctccctttgcccttctcctgtatcccacaccaccacatccaacctccttgcctgcctgtatcctcattggtgggagcccagccatggccctaattgtgcctgagcttgactttcagtcagggccacagtgagcattaaattattattccatacaaaaaaaaaaaaaaaaaa

SEQ ID NO: 180 - DNA, 4421 bp, Homo sapiens
tgctgcgaggatgctgcctgggcggctgtgctgggtgccgctcctgctggcgctgggcgtggggagcggcagcggcggtggcggggacagccggcagcgccgcctcctcgcggctaaagtcaataagcacaagccatggatcgagacttcatatcatggagtcataactgagaacaatgacacagtcattttggacccaccactggtagccctggataaagatgcaccggttccttttgcaggggaaatctgtgcgttcaagatccatggccaggagctgccctttgaggctgtggtgctcaacaagacatcaggagagggccggctccgtgccaagagccccattgactgtgagttgcagaaggagtacacattcatcatccaggcctatgactgtggtgctgggccccacgagacagcctggaaaaagtcacacaaggccgtggtccatatacaggtgaaggatgtcaacgagtttgctcccaccttcaaagagccagcctacaaggctgttgtgacggagggcaagatctatgacagcattctgcaggtggaggccattgacgaggactgctccccacagtacagccagatctgcaactatgaaatcgtcaccacagatgtgccttttgccatcgacagaaatggcaacatcaggaacactgagaagctgagctatgacaaacaacaccagtatgagatcctggtgaccgcctacgactgtggacagaagcccgctgctcaggacaccctggtgcaggtggatgtgaagccagtttgcaagcctggctggcaagactggaccaagaggattgagtaccagcctggctccgggagcatgcccctgttccccagcatccacctggagacgtgcgatggagccgtgtcttccctccagatcgtcacagagctgcagactaattacattgggaagggttgtgaccgggagacctactctgagaaatcccttcagaagttatgtggagcctcctctggcatcattgacctcttgccatcccctagcgctgccaccaactggactgcaggactgctggtggacagcagtgagatgatcttcaagtttgacggcaggcagggtgccaaaatccccgatgggattgtgcccaagaacctgaccgatcagttcaccatcaccatgtggatgaaacacggccccagccctggtgtgagagccgagaaggaaaccatcctctgcaactcagacaaaaccgaaatgaaccggcatcactatgccctgtatgtgcacaactgccgcctcgtctttctcttgcggaaggacttcgaccaggctgacacctttcgccccgcggagttccactggaagctggatcagatttgtgacaaagagtggcactactatgtcatcaatgtggagtttcctgtggtaaccttatacatggatggagcaacatatgaaccatacctggtgaccaacgactggcccattcatccatctcacatagccatgcaactcacagtcggcgcttgttggcaaggaggagaagtcaccaaaccacagtttgctcagttctttcatggaagcctggccagtctcaccatccgccctggcaaaatggaaagccagaaggtgatctcctgcctgcaggcctgcaaggaagggctggacattaattccttggaaagccttggccaaggaataaagtatcacttcaacccctcgcagtccatcctggtgatggaaggtgacgacattgggaacattaaccgtgctctccagaaagtctcctacatcaactccaggcagttcccaacggcgggtgtgcggcgcctcaaagtatcctccaaagtccagtgctttggggaagacgtatgcatcagtatccctgaggtagatgcctatgtgatggtcctccaggccatcgagccccggatcaccctccggggcacagaccacttctggagacctgctgcccagtttgaaagtgccaggggagtgaccctcttccctgatatcaagattgtgagcaccttcgccaaaaccgaagcccccggggacgtgaaaaccacagaccccaaatcagaagtcttagaggaaatgcttcataacttagatttctgtgacattttggtgatcggaggggacttggacccaaggcaggagtgcttggagctcaaccacagtgagctccaccaacgacacctggatgccactaattctactgcaggctactccatctacggtgtgggctccatgagccgctatgagcaggtgctacatcacatccgctaccgcaactggcgtccggcttcccttgaggcccggcgtttccggattaagtgctcagaactcaatgggcgctacactagcaatgagttcaacttggaggtcagcatccttcatgaagaccaagtctcagataaggagcatgtcaatcatctgattgtgcagcctcccttcctccagtctgtccatcatcctgagtcccggagtagcatccagcacagttcagtggtcccaagcattgccacagtggtcatcatcatctccgtgtgcatgcttgtgtttgtcgtggccatgggtgtgtaccgggtccggatcgcccaccagcacttcatccaggagactgaggctgccaaggaatctgagatggactgggacgattctgcgctgactatcacagtcaaccccatggagaaacatgaaggaccagggcatggggaagatgagactgagggagaagaggaggaagaagccgaggaagaaatgagctccagcagtggctctgacgacagcgaagaggaggaggaggaggaagggatgggcagaggcagacatgggcagaatggagccaggcaagcccagctggagtgggatgactccaccctcccctactagtgcccaggggtctgctgcctggcccacatgtcccttttgtaaaccctgacccagtgtatgcccatgtctatcatacctcacctctgatgtctgtgacatgtctgggaaggccttctccagcttcctggagcccaccctttaagccttgggcactccctgtgtttcatccatggggaagttccaagaagcccagcatggccatcagtgaggacttcagggtagactttgtcctgtagcctccacttctgccctaagttccccagcatcctgactacctgtctgcagagtttgcctttgttttttcctgcagggaagaaggcccacctttgtgtcactcacctccccaggctcagagtccccaaggccctggggttccaactcactgtgcgtctcctccacacagaccagtaggttctcctatgctgactccaggttgcttcatacaaggagggtggttgaacttcacacacgtaaggtcttagtgcttaacagtttaaaggaaagtccttgttgaggcagaactaagtttacagggaaaggtacacacattctctctctctctctctctctgtctatctagttccccagcttggagagcctttccccttgcttctttctgaggccatataagcttataagaaaagtcccaaaccaagaataggtccttggccacaagcagggtctgatcccccatcagagctatctgagcctgcctgtctgggcacctgctgcaaccatgcagctaccctgccaggggcactcagcaaacagaaccacagggcccaggaggcattccacacaggcactgccccaggacaacacaacaaggacagtcacaacaaggacaacaaggacacaacacaacacacaacaaggacagtcacaacaagcctagagccagaaagcagatggaaatgctaatgaggtcaaacgtaggcttcatggtgggtggagtgggggtggctgggctcccccaggacagaggggaccctgaggttggcaaggctctcaccactcagccttatggtcccttatctcctatcttccctcttgagaaaatacacgctttctgcatgtattagaaacgcacgagctccaccaagtctacaatgaaagtttgaaatttaactgcaaggaattagaagcatatttgcaatcattgcagcttcttctttcttctgctcataaaaggaggaacactttagatagagggcaaatatatctgaaaacctaatttctttctttttttgataaggaaatcttttccatctccatcctaacatgcacaacctgtgaagagaattgtttctatagtaactggtctgtgatcttttgtggccaagagaatagcaggcaagaattagggccttgacagaatttccacgaagctctgagaacatgtttgtttcgaatgtctgattcctctttgtcatcaatgtgtatgctctgtccccatccttcactcctcctcaagctcacaccaattggtttggcacaggcacagagctggtccctagttaagtggcatttatgttaaaaaaaa

SEQ ID NO: 181 - DNA, 1027 bp, Homo sapiens
tttgtctcttcctgagaaacgagcaaacctgaaagctactctctcagcttcagagggaaaaaatggttgtagatttctggacttgggagcagacatttcaagaactaatccaagaggcaaaaccccgggccacatggacgctgaagttggatggcaaccttcagctagactgcctggctcaagggtggaagcaataccaacagagagcatttggctggttccggtgttcctcctgccagcgaagttgggcttccgcccaagtgcagattctgtgccacacgtactgggagcactggacatcccagggtcaggtgcgtatgaggctctttggccaaaggtgccagaagtgctcctggtcccaatatgagatgcctgagttctcctcggatagcaccatgaggattctgagcaacctggtgcagcatatactgaagaaatactatggaaatggcacgaggaagtctccagaaatgccagtaatcctggaagtgtccctggaaggatcccatgacacagccaattgtgaggcatgcactttgggcatctgtggacagggcttaaaaagctgcatgacaaagccgtccaaatccctactcccccacctaaagactgggaattcctcacctggaattggtgctgtgtacctcgcaaaccaagccaagaaccagtcagctgaggcaaaagaggctaaggggagtgggtatgagaaattagggcccagtcgagacccagatccactgaacatctgtgtctttattttgctgcttgtatttattgtagtcaaatgctttacatcagaatgatgaaaataggcttgccactttctcttattttaattccatggtagtcaatgaactggctgccactttaatataactgaaaattcattttgagaccaagcaggatcaagtttgtagaataaacactggtttcctagccatcctctgaaaacagtatgaaacatgaccaagtacataatggatttagtaataaatattgtcgaattgctaaaaaaaaaaaaaaaaaa

SEQ ID NO: 182 - DNA, 1900 bp, Homo sapiens
agccgcggggagcgaggagcgcgcggagccggccatgggcaagtcagcttccaaacagtttcataatgaggtcctgaaggcccacaatgagtaccggcagaagcacggcgtccccccactgaagctctgcaagaacctcaaccgggaggctcaacagtattctgaggccctggccagcacgaggatcctcaagcacagcccggagtccagccgtggccagtgtggggagaaccttgcatgggcatcctatgatcagacaggaaaggaggtggctgatagatggtacagtgaaatcaagaactataacttccagcagcctggcttcacctcggggactggacacttcacggccatggtatggaagaacaccaagaagatgggcgtggggaaggcgtccgcaagtgacgggtcctcctttgtggtggccagatacttcccagcggggaatgttgtcaatgagggcttcttcgaagaaaacgtcctgccgccgaagaagtaacttgttaaatgtaatgggaaggtggcagacttaagaacgtggatatgaagtgcctagaaccaccacaacctggctgtgcgtctgtccctgtgggtgtatgtgcttgtgtgtgtgatgcatgtgagcgtctctggcacacacacttggacatacagttctgtgtgcgctcattcttattacaggagtgagcaaaggaagcatttaccccgatggttacctagaccacgattatttggattggggggaggggggatccgttttttttttttaattttttgttatttctaagcaaacctcttttgtacttttcttacttctaatatccatccctggactttttgtattccaaatgtttgtgatgctgagaagtgaagttcattttatgtgatcttcatgcgtcgtaatctacttttggtagataattaagattattaaaccctcatttaaatgtgacataaaatacagctttaagcacataaatataaagcagcttccatcaggaacatggagcaggcagggactccattttacagaattactgagatttctcagttgtaaaacatgatgtcatcctgcatgcctcctggaattctccaatggggtcgccaaacaacaaatggagaaaaaaagttttacttccttgcattcttctacctttaaatagcaaagtaccactaccaccaccacctcttgcccccttccctcttttcttaaacttctggcatttcagagctcagcaggctacccctggtttctggagagttgggctaggcctgaagctccccctcccccacctctgctaggcagcccaggcctggtctgggagacagcccctcaccctgcctgggctcttggccaagcggccttggatggatgaagtcagagaggtggggtgagggtgagcttactcagggcccccagaggaagccctcagcctctgccctccccccacacagggcgggagcccaggcctgttcctggcagctgtggctgcagctgtgctcctgctccctcctggaatgtgcgacaagcccaaatgttccagggaggcggccggggcagggggcttagaagtgctaatatggttctgtgttttgcctgaaacgataccaggttcccctgaatagcaactttacaaggtccatgtgggagggaccaacccagatgccctgctgagtgtccctgaaaccatggcagctccatctgtcaagatggcaggggccggagtgagggggctgctggcttaacagcaggcatctgggcaggccagtcctcaaagcagctcctgaaggtctgtgttgcactgtcaccagtctcaagctatgcctctaatttcaccagggatattgactaagaagacaataaaatctttttctttgtgtaaaaaaaaaaaaaaaaaaa

SEQ ID NO: 183 - DNA, 5281 bp, Homo sapiens
gggacccagaacctcggacgagcggcgggcacccgcgagcggacggcggccgcgtagtgagcaatggcctgagcccccatggctgcccctcaggacctggacatcgctgtgtggctggccacggtgcacctggagcagtatgcagacacgttccgacggcatggcctggctacagcaggtgcagcccggggcctgggccacgaggagttgaagcagttgggcatcagcgccacagggcaccggaaacgcattctacgcctgctacagacaggcaccgaagagggctccctggatcccaaatcagatagtgccatggaaccatcccccagcccagccccgcaagcccagccccctaagcccgtgccgaagcccaggaccgtgtttggtggactcagtggccctgccaccactcagagacctgggctgagcccagccctcgggggaccaggagtgtccaggagcccagagcccagcccaaggcctcctcctctccccacttcctcctctgagcagtcttcagccctaaatactgtggagatgatgcctaattccatctacttcggcctggactcaagaggcagggcacaggcagctcaggacaaggccccagacagctcccaaatctctgcccccacccctgccctcaggcccacaacaggcacagtgcacatcatggatcctggttgcctgtactatggtgtccaacctgtggggactccaggagcccccgacagaagagagagcagaggtgtttgtcagggcagggctgaacacaggctcagcagacaggatctggaggcacgggaggatgctggctatgccagccttgagctacctggagactccaccctcttatcgcccaccctggaaacagaggagaccagtgatgacctcatttcaccctatgccagcttctccttcacggcagaccgcctcacgcccctgctcagtggctggctagacaagctctcccctcagggaaactatgtcttccagagacgctttgtgcagttcaatgggaggagtctgatgtactttggcagtgacaaggaccccttccctaagggtgtgatacctttgactgccattgagatgacccgcagcagcaaggacaacaagttccaggtcatcaccggccagagggtgttcgtgttccgcacagagagcgaggctcagcgggacatgtggtgctccacgctgcagtcctgtctgaaggagcagcgcctcctgggccacccccggcccccccaaccaccccgacccctccgcacgggcatgctggagctgcgtggacacaaggccaaggtgtttgctgccttgagccctggagagctggcactgtacaagagtgagcaggccttctctctgggcatcgggatctgcttcatcgaactgcagggctgcagcgtccgggagaccaagagtcgaagctttgacctgctcacaccccatcgctgcttcagcttcacagccgagtctgggggtgctcggcagagctgggcggccgctctgcaggaagcagtaaccgagaccctgtctgactacgaggtggctgagaagatctggtctaatcgggccaaccggcagtgtgcggactgtgggtcctcccgcccagattgggctgctgtcaatttgggggtggtcatctgcaagcagtgtgcaggtcagcaccgggccctgggttctgggatctccaaggtgcagagcctgaagctggacacgagtgtctggagtaatgagatagtacagttattcattgtcctgggaaatgatcgtgccaaccgcttctgggcagggaccctacccccaggtgagggactacatccagatgcgacccctggcccccggggagagttcatctcccgaaagtaccgtctgggtctcttccggaagccccaccctcagtacccagatcatagccagcttctccaggcactgtgtgcagctgtggcaagacccaacctgctgaagaacatgacccagctcctctgtgttgaggcctttgaaggcgaggagccctggttccccccagcccctgatggcagctgccctggcctcttgccctcagacccctcccctggtgtgtacaatgaggtggtggtgcgtgctacttacagcggcttcctgtactgcagtcccgtcagcaacaaagctggaccctcaccccctcgcaggggccgggatgctcccccgcgcctttggtgtgtgctgggagcagctctggaaatgtttgcatcggaaaacagccctgaacccctcagcctcatacagccccaggatattgtatgtctgggtgtgagccccccacccactgacccaggtgacaggttccccttttcctttgagctcatcctcgctggggggaggatccagcattttggcacagatggagctgacagtctggaggcctggactagtgctgtgggcaagtggttctccccgctgagctgccaccagctgctgggccccgggctgctgcggctgggccgcctatggctgcggtccccctcccatacagccccggcccctggtctctggctgtcagggtttggcctccttcgtggtgaccacctcttcctgtgctcagcgccgggcccaggccccccagcccctgaggacatggtgcatctgcggcggctacaggagatcagtgtggtttctgcagctgacaccccagataagaaagagcatttggtcctggtggagacaggaaggaccctgtatctgcaaggagagggccggctggacttcacggcatggaacgcagccattgggggcgcggctggtgggggcggcacagggctgcaggagcagcagatgagccggggtgacatccccatcatcgtggatgcctgcatcagttttgttacccagcatgggctccggctggaaggtgtataccggaaagggggcgctcgtgcccgcagcctgagactcctggctgagttccgtcgggatgcccggtcggtgaagctccgaccaggggagcactttgtggaggatgtcactgacacactcaaacgcttctttcgtgagctcgatgaccctgtgacctctgcacggttgctgcctcgctggagggaggctgctgagctgccccagaagaatcagcgcctggagaaatataaagatgtgattggctgcctgccgcgggtcaaccgccgcacactggccaccctcattgggcatctctatcgggtgcagaaatgtgcggctctaaaccagatgtgcacgcggaacttggctctgctgtttgcacccagcgtgttccagacggatgggcgaggggagcacgaggtgcgagtgctgcaagagctcattgatggctacatctctgtctttgatatcgattctgaccaggtagctcagattgacttggaggtcagtcttatcaccacctggaaggacgtgcagctgtctcaggctggagacctcatcatggaagtttatatagagcagcagctcccagacaactgtgtcaccctgaaggtgtccccaaccctgactgctgaggagctgactaaccaggtactggagatgcgggggacagcagctgggatggacttgtgggtgacttttgagattcgcgagcatggggagctggagcggccactgcatcccaaggaaaaggtcttagagcaggctttacaatggtgccagctcccagagccctgctcagcttccctgctcttgaaaaaagtccccctggcccaagctggctgcctcttcacaggtatccgacgtgagagcccacgggtggggctgttgcggtgtcgtgaggagccacctcgcttgctgggaagccgcttccaggagaggttctttctgctgcgtggccgctgcctgctgctgctcaaggagaagaaaagctctaaaccagaacgggagtggcctttggaaggtgccaaggtctacctgggaatccgcaagaagttaaagcccccaacaccgtggggcttcacattgatactagagaagatgcacctctacttgtcctgcactgacgaggatgaaatgtgggattggaccaccagcatccttaaagcccagcacgatgaccagcagccagtggtcttacgacgccattcctcctctgaccttgcccgtcagaagtttggcactatgcctttgctgcctatccgtggggatgacagtggagccaccctcctctctgccaatcagaccctgcggcgactacacaaccggaggaccctgtccatgttctttccaatgaagtcatcccaggggtctgtggaggagcaagaggagctggaggagcctgtgtacgaggagccagtgtatgaggaagtaggggccttccctgagttgatccaggacacttctacctccttctccaccacacgggagtggacagtgaagccagagaaccccctcaccagccagaagtcattggatcaaccctttctctccaagtcaagcacccttggccaggaggagaggccacctgagccccctccaggccccccttcaaagagcagtccccaggcacgggggtccctagaggaacagctgctccaggagctcagcagcctcatcctgaggaaaggagagaccactgcaggcctgggaagtccttcccagccatccagcccccaatcccccagccccactggccttccaacacagacacctggcttccccacccaacccccatgcacttccagtccaccctccagccagcccctcacatgaccctaggaccagcagtctgagagggtaggtaccagaagacccagaaactcttatcgtggcactgttgcagcttcctctgccctggctggaaagactccagaatccagtgtggtgctgtggaaggagcactggactaaaggcttcagtggctgcgtgtcccaggacaggtcatggcccctctctgggcccagcccatttatctataccatgaggtaactgaagtaaggagagcagtgaatgtcaaactgtgtttcttagagccataagccccacatattatccctgaacaagggcagctcctgctttatatatttgatacgtaggggttccatgagagattttgggttttaaaggaatggttttactgcattaaagaaaaaaaatgctttggaaaccagaggcctgggtgatgttaaagtctatcctgtcccacttcctacattctgggactaccgtgaagcctggagtagggagagcgagtttgggagctgggactcggggagtcaaaaatagatgagtaattgtcaataaacctgggaaccaaaagacaaaaaaaaaaaaaaaaaaa

SEQ ID NO: 184 - DNA, 3309 bp, Homo sapiens
tgaaagcggaagtagggccttcgcgcacctcatggaatcccttctgcagcacctggatcgcttttccgagcttctggcggtctcaagcactacctacgtcagcacctgggaccccgccaccgtgcgccgggccttgcagtgggcgcgctacctgcgccacatccatcggcgctttggtcggcatggccccattcgcacggctctggagcggcggctgcacaaccagtggaggcaagagggcggctttgggcggggtccagttccgggattagcgaacttccaggccctcggtcactgtgacgtcctgctctctctgcgcctgctggagaaccgggccctcggggatgcagctcgttaccacctggtgcagcaactctttcccggcccgggcgtccgggacgccgatgaggagacactccaagagagcctggcccgccttgcccgccggcggtctgcggtgcacatgctgcgcttcaatggctatagagagaacccaaatctccaggaggactctctgatgaagacccaggcggagctgctgctggagcgtctgcaggaggtggggaaggccgaagcggagcgtcccgccaggtttctcagcagcctgtgggagcgcttgcctcagaacaacttcctgaaggtgatagcggtggcgctgttgcagccgcctttgtctcgtcggccccaagaagagttggaacccggcatccacaaatcacctggagaggggagccaagtgctagtccactggcttctggggaattcggaagtctttgctgccttttgtcgcgccctcccagccgggcttttgactttagtgactagccgccacccagcgctgtctcctgtctatctgggtctgctaacagactggggtcaacgtttgcactatgaccttcagaaaggcatttgggttggaactgagtcccaagatgtgccctgggaggagttgcacaataggtttcaaagcctctgtcaggcccctccacctctgaaagataaagttctaactgccctggagacctgtaaagcgcaggatggagattttgaagtacctggtcttagcatctggacagacctcttattagctcttcgtagtggtgcatttaggaaaagacaagttttgggtctcagcgcaggcctcagttctgtataggcaatgctgtgttattacttgaatatagaatatatagtttacaaaatgaaaattacaatgttctcaccaaatatatgccttcgtgtgtccaaagtataattattttagatgctaattttgaatagtttattaaacagttataaatatgcaaagtagctggcatgtagtgtcacggattttctggatagaggaagtgattggaagtattccacttaaagccatggaattagcaatagtttgctttttaatagaaggcccatttgtaagaatgttgaaaatatgtgtaccgtttaaagaaaaagcagctttaaagtgacaaacaaaataccctttttcttttagtatggtttatttttctaggttttctgtccctccctcagtagtgaagagttttctttattcctggcagtgtcaggaatattggtttgaaaagctgttggcctatctggagtttggccttgttaacctagtattctaaccagttaaccagccttagtatgcattaaaattgtattgttcagaaagtttgtttctcattttctgcaaattcttactttgaaaatgaatcaccacatagtatgtccctttaaagcattgacgcacagacaaatgtttaaagcacagtaaatacaaatatatgcctttggatactaaattaatgcttgatgataaaagaatcaaacttttttttttttgagatggagtctcgctctgtcacccagtctggagtgcagtggtgtgatcactgctcagtgcaacctctgcctcccaggatcaagcaattctgactcagcctcccaagtagctgggattacaggtgcaggccaccatgcccggctaattttttgtatttttagtagagacggggtttcaccatgctggccaggctggtctcaaacacctgaccttgtgatccgtccgccttggcctcccaaagtgctgggattacaggcgtgagccaccgcgcctggccaaaacaacattttaagtagaagatccaggttttagtgcagcttctgccgttaactaggttaataaatcacaaccttggggccacagttgccttatatgtaaatgaagtgtttagaataaaatagttaaatttccttatttttcccttggtggctgccctgtggaaacagtttagaatatttgttttgtgtgtaggaacctagttgtgttagtttacctgggtgttccacagctgatagtgattgccttgaataaattcaagggcaatttattcatttttactagggagatagacctttacagcaatcaagatatttttgtccatatccaggttagctggtaagaggatttttttggagaaaaaaatgatatttagaaagttaatttctaattccggaatggaataaaaacaatatgagtagtgtaatcttgtagaaaaagagttgtataatcttgtagaatttctcattctgtggtacaacccaggggtaaactattattccagtagtcagtacacttttctagataaatcttgagtgaaaaccagcaatttctttttccttgtggtctgattcctttttctaatccatgaaggccatcttgtagattacatttatcattaatgcaagaataaagacaattcctcctgtcagttgcgtgaattttttttaagaaacaacccagtgaagagttctaccatagcaaggcctaatgttagctttagctttagaaaataacagtttgtgaacttacttccctatatttgcagctgtatctcacactatgatttacaataaaattgtaaagattgacaatagacttaagaaataacattttaaaatctattttatacttaccatttattattctgttattttagtctccatatgttcattacatacataatcttatttaatcttcacaccaaaactgtattcttatgaatatacgctaaaagattaagtaaaatgcccaagggtataaacaaaagcaacatgaaagtggaagccgtatctgtcatttattttatttccagaagcctagcacagtgtccagcatatggtagatacttgtagtgtttgaataaatgaaaccagcattagagctttatatactttctcttaaggacttgaaaagattaggaatctacgcatacactgagagagaaaaaagtgagagga

SEQ ID NO: 185 - DNA, 2244 bp, Homo sapiens
gatgctgggcgagagagagccgccgcgccggagcctccttctttcctgcctctgattccgggctgtcatggcgacccccaacaatctgacccccaccaactgcagctggtggcccatctccgcgctggagagcgatgcggccaagccagcggaggcccccgacgctcccgaggcggccagccccgcccattggcccagggagagcctggttctgtaccactggacccagtccttcagctcgcagaaggtgcggctggtgatcgccgagaagggcctggtgtgcgaggagcgggacgtgagcctgccacagagcgagcacaaggagccctggttcatgcggctcaacctgggcgaggaggtgcccgtcatcatccaccgcgacaacatcatcagtgactatgaccagatcattgactatgtggagcgcaccttcacaggagagcacgtggtggccctgatgcccgaggtgggcagcctgcagcacgcacgggtgctgcagtaccgggagctgctggacgcactgcccatggatgcctacacgcatggctgcatcctgcatcccgagctcaccaccgactccatgatccccaagtacgccacggccgagatccgcagacatttagccaatgccaccacggacctcatgaaactggaccatgaagaggagccccagctctccgagccctacctttctaaacaaaagaagctcatggccaagatcttggagcatgatgatgtgagctacctgaagaagatcctcggggaactggccatggtgctggaccagattgaggcggagctggagaagaggaagctggagaacgaggggcagaaatgcgagctgtggctctgtggctgtgccttcaccctcgctgatgtcctcctgggagccaccctgcaccgcctcaagttcctgggactgtccaagaaatactgggaagatggcagccggcccaacctgcagtccttctttgagagggtccagagacgctttgccttccggaaagtcctgggtgacatccacaccaccctgctgtcggccgtcatccccaatgctttccggctggtcaagaggaaacccccatccttcttcggggcgtccttcctcatgggctccctgggtgggatgggctactttgcctactggtacctcaagaaaaaatacatctagggccaggcctggggcttggtgtctgactgtcggtgtctctgtgctgtgtgattccccgtgagctctcagtaactcactgtctcatgaacacttggacagccctccccgcccttcgttctgagtaataataccgtcagtgtgaaaacattccgtagtttagaagtagacgttgccaatgctgtgactcaaggccacggctctactaaaagagagagaggaagcgagagagagagagaaaaaacaaaaaacagaaaacacgaatgccttttctatcgattcaaggtctcaagatggaactgtggagactggttaggatctgaggtgagtcccaggatgtttcgtccaccagggcccagattctgggaggtgctggggactcagagggcctgacccctcacctccccttccctcttgcccagggaactcttccacaggacaaagccgacatcaagactcaactcctctaaccggtacctctgaatggggctggataaccggagaccccatgggaggtccctgaagatcagaaggggcttcacgcttctcctggacatggactagcttgagccaaggcagtggcacccaaaaaccaggctgcagtggggacggataccatgagcacaccctctcattgtccttctgatttggtccatgtgttgggtttggccttagtagaaatctctgaaggcagcagccatcatcctcttcctaccttgagtttttctaccctgtgaggtgggactttcagtaaaagccatgttgaccctctctcagaaggtcagtccagcccaagtgcaggggcggatctggaggtggacaaacctaggtccccctcctagcctctgtccaagccatctccttcaatatcccccccttcctgtcactcccggggctgtccctgtactacacggtgccatggagccggggagagcggggaagtctctgcatccatgccacccaccccagtcgggtctcactttcctgtgccttttgcatgttgggaaagggtcttggtgtcactgccgctcatgcatagaaaccaccaaaagccccaataaagcatccaggaggaa

SEQ ID NO: 186 - DNA, 4401 bp, Homo sapiens
ccttctgcgttcccagcgcgcggcccgaatggcggccgacaagggcccggcggctggacctcggtcgcgagctgccatggcccagtggaggaagaagaaagggctccggaagcgccgaggcgcggcctcccaggcccgcggcagcgactcggaggacggcgagtttgagatccaggcggaagatgacgcccgggcccggaagctgggacctggaagacccctgcccaccttccccacctcggaatgcacctcggatgtggagccggacacccgggagatggtgcgtgcccagaacaagaagaagaagaagtctggaggcttccagtccatgggcctgagctacccggtgttcaaaggcatcatgaagaaggggtacaaggtgccaacacccatccagaggaagaccatcccggtgatcttggatggcaaggacgtggtggccatggcccggacgggcagtggcaagacagcctgcttcctcctcccaatgttcgagcggctcaagacccacagtgcccagaccggggcccgcgccctcatcctctcgccgacccgagagctggccctgcagaccctgaagttcactaaggagctaggcaagttcactggcctcaagactgccctgatcctgggtggagacaggatggaagaccagtttgcagccctgcacgaaaatcccgacataattattgccacgcccggacggttggtgcatgtggctgtggaaatgagcctgaagctgcagagtgtggaatacgtggtgttcgatgaagctgaccggctttttgaaatgggtttcgcagagcagctgcaggagatcatcgcccgcctccccgggggccaccagacggtgctgttctccgccacgctgcccaaactgctggtggaatttgcccgggctggcctcacggagcccgtgctcatccggcttgacgtggataccaagctcaacgagcagctgaagacctccttcttcctcgtgcgggaggacaccaaggctgccgtgctgctccacctgctgcacaacgtggtgcggccccaggaccagaccgtggtgtttgtggccacgaagcaccacgccgagtacctcactgagctgctgacgacccagcgggtgagctgcgcccacatctacagtgccctagacccgacagcccgcaagatcaatctcgccaaattcacgcttggcaagtgctccactctcattgtgactgacctggccgcccgaggcctggacatcccgctgctggacaatgtcatcaactacagcttccccgccaagggcaaactcttcctgcaccgcgtgggccgtgtggctcgggctggccgaagtggcacagcctactccttggtggcccctgatgaaatcccctacctgctggatctgcacctgttcctgggccgctccctcaccctcgcccgacccctcaaggagccctcaggtgtggccggtgtggatggcatgctgggtcgggtgccacagagtgtggtggacgaggaggacagtggtctgcagagcaccctggaggcatcgctggagctacggggcctggcccgcgttgctgataacgcccagcagcagtatgtgcgctcacgcccggcgccctcgcctgagtccatcaagagggccaaggagatggaccttgtggggctgggcctgcaccccctcttcagctcgcgttttgaggaggaggagctgcagcggctgaggctggtggacagcataaagaactaccgctcccgggcgactatctttgagatcaacgcctccagccgagacctgtgcagccaggtgatgcgcgccaagcggcagaaggaccgcaaggccatcgcccgcttccagcagggacagcaggggcggcaggagcagcaggagggcccagtgggcccagccccgagccgcccagcactgcaggagaagcagcctgagaaggaggaggaggaggaggcgggagagagtgtggaggacattttctcagaggtcgtgggccggaagcggcagcggtcaggacccaacaggggagccaagaggcggagggaggaggcccggcagcgggaccaggaattctacatcccctaccggcccaaggactttgacagcgagcggggcctgagcatcagcggggaagggggagcctttgagcagcaggcagctggcgctgtcctggacttgatgggggatgaagcccagaacctgacgaggggccggcagcagctcaagtgggaccgtaagaagaagcggtttgtgggacagtcaggacaggaagacaagaagaagattaagacagagagcggccgctacatcagcagctcctacaagcgagacctctatcagaagtggaaacagaaacagaaaattgatgatcgtgactcggacgaagaaggggcatctgaccggcgaggcccagagcgaagaggtgggaagcgagaccgtggccaaggtgcatcccggccccacgccccaggcacccctgcaggccgagtccgcccggaactcaagaccaagcagcagatcctgaagcagcggcgccgggcccagaagctgcacttcctgcagcgtggtggcctcaagcagctctctgcccgcaaccgccgccgcgtccaggagctgcagcagggcgccttcggccggggtgcccgctccaagaagggcaagatgcggaagaggatgtgaggaccaggacccagccccgtggctccttgattggccttagggtgggcatcagcagacgttcccgtgcaccactgtgtgcctggccctgtgctgggcactgggggcactccctgcaggagccatcatctgtgaaaaggagcactgtatggccacagaagggcagcagctgcgtcagcctaagacagagacatttgaacagggccttgaagggtgtgcaggagttcgccagcaaagccaggcaggccaagacttgagttggcaactcagctgctgctgcttccatgtgttctgggttcagaggtcatggctgcaccggtcagagccctgagtgcctcagggtttggcaatggaatttttaatgtaataaatctttattgagcactgctggtggccaggagtgcggtctacttggggaactggaatggagagacccaggtactaaaatcccagctaacgtggcagaggagttgcgggtctcctgagggtgagttctgctgccttgtccatttagcgatgaggaaagtgaagctcagagcacaaaccaggtgccagaggcgggagttggtcccccttcctcccactggacatggttgcagctgggagtgggctgggggaggggaacaggatgcccagcccagggggcaaggacacagctgctcccctctggctatgaagaggttaacgcggcccctccacacctggaggtcagaacctggcctgtcctctgtcttcttgccacccaccccctgtttgaggttctgagaaggtcaagggcagccccagcagctggattctcaggctgggcccctcacctggcagagtccatagtggagggggccttggtgatctctcatctagcatggaccctgttctgagacctgacaaagagttttttttcatgccccaaccaccctggcagggagggcctggtctgatctcattttagaggcagttgccccacacatagccccttgaccttcccatcacctcctcatcagggcctgcatttatggagtgcttgctatgtgcccctcatggcaggcccacagcactctgaacaggcacagccctcccatcttcccaatgaggaaacggattcaggaagagccactcagtccacaccccattggaaatgtgggccctcctatctcagggtctctcaggggttccctctcccgctgctcacctgtgtcagggctaggaggcaggggctgcaggctcagcctgacccaggccggccagcatggcagagaggtcctgcatgaacagcttcacctgggggggcccagcacgaagtcacatcccagccccagagtcactgtccagcccccacccctcaacacgcgggggaggccgaaaggtagggcggggactggagatcccctcattaaaagaacagtgatgatggtggttcccagaggtggtgactgagatcctaaaccgttctgggttttgaaagcctcaggccaaccttcccaactgctgcgtgagcagacaccttcacagcttcctcgctgctgtcacctgcactatccaattagtattttcatttacatcaatcagctttattttcttgtaactggatcagtcatattcattggtttgtgacctactcttatctccgtgggtggctctccttttgttttaattaacttctttatgaatatgaacttaataaataccatggatccattgtaaaaactaaaaaaaaaaaaaaaaaaaaaaaa

SEQ ID NO: 187 - DNA, 1843 bp, Homo sapiens
agtcgtaggcgctggccgctgacatgttgaggactacgcgcggcccaggcctgggccccccgctgctccaggccgcgctgggccttgggcgggctgggtggcactggcctgcgggccgggcggcgagcggggggcgcgggcgggcctggctgcagcccacgggccgggagacgggtgtgcaggtgtacaacagcctcaccgggaggaaggaacccctaatcgtggcgcacgccgaagccgcctcctggtatagctgtggaccaactgtatatgatcatgcgcaccttggccatgcttgctcatatgttagatttgatatcattcgaaggatcctaaccaaggtttttggatgcagcatagtcatggtgatgggtattacagatgtagatgataaaatcatcaaaagagccaatgagatgaatatttcccccgcttccctcgccagtctttatgaggaagacttcaagcaggacatggcagccctgaaggttctcccacccacggtgtacctgagggtaaccgaaaatattcctcagataatttctttcattgaaggaatcattgctcgtgggaacgcttattcaacggcaaaaggcaatgtctacttcgatctgaagtctagaggagacaagtatggcaaattggtcggcgtggtccctggtccagtcggagagccagcggactctgacaagcgtcatgccagtgacttcgccctgtggaaggcggccaaaccccaggaggtgttctgggcctctccctggggacccgggaggccgggctggcacatcgagtgctctgccatcgctagtatggtatttggaagtcaactggatatccattcaggtgggatagatttagcttttccacatcatgagaacgaaattgcacagtgcgaagtctttcatcagtgcgagcagtggggaaattattttctgcattctgggcatttgcacgccaaaggcaaagaagaaaaaatgtccaaatcattaaagaactacattactattaaggactttctgaagaccttttcccccgatgtcttccggttcttctgcctgcggagcagctaccgctcagccatcgactacagtgacagcgccatgctccaagctcagcagctgctcctggggctgggctctttcctggaggacgcacgtgcctacatgaaggggcagctggcctgcggctccgtcagggaagcgatgctgtgggagaggctctccagcaccaagagggccgtgaaggcggccttggcagatgattttgacacacccagggtggttgatgccatcctgggccttgcacaccacgggaatggacagctcagggcgtccctgaaggaacctgaagggccgagaagtcctgctgtgtttggtgccatcatctcttactttgaacagttttttgaaactgttggaatttctctggcaaatcaacagtacgtttcaggagacggcagcgaggctaccttgcatggtgtggtggacgagctggtgcggttccggcagaaggtccggcagtttgcgctggccatgcccgaggccacgggggacgcccggcggcagcagctcctagaaaggcagcccctgctggaagcatgcgacaccctgcgccggggcctgactgcccacggcatcaacatcaaggacagaagcagtacaacatccacgtgggaactgctggatcaaaggacaaaagaccaaaaatcagcgggctgaggatggagcacagccatgaacctgctcacgacaagacgcacccatgcttctcagggtcaaggctttatgttaaagcttcctgtcggggctgctaggtcagcattaaagtaaggcaaccaacagtg

SEQ ID NO: 188 - DNA, 2442 bp, Homo sapiens
aaaaaaatcgctgggcgactgatttcgagtttccggtcaggttaggccgggggggtgcggtcctggtcggaaggaggtggagagtcgggggtcaccaggcctatccttggcgccacagtcggccaccggggctcgccgccgtcatggagagcggagggcggccctcgctgtgccagttcatcctcctgggcaccacctctgtggtcaccgccgccctgtactccgtgtaccggcagaaggcccgggtctcccaagagctcaagggagctaaaaaagttcatttgggtgaagatttaaagagtattctttcagaagctccaggaaaatgcgtgccttatgctgttatagaaggagctgtgcggtctgttaaagaaacgcttaacagccagtttgtggaaaactgcaagggggtaattcagcggctgacacttcaggagcacaagatggtgtggaatcgaaccacccacctttggaatgattgctcaaagatcattcatcagaggaccaacacagtgccctttgacctggtgccccacgaggatggcgtggatgtggctgtgcgagtgctgaagcccctggactcagtggatctgggtctagagaccgtgtatgagaagttccacccctcgattcagtccttcaccgatgtcatcggccactacatcagcggtgagcggcccaaaggcatccaagagaccgaggagatgctgaaggtgggggccaccctcacaggggttggcgaactggtcctggacaacaactctgtccgcctgcagccgcccaaacaaggcatgcagtactatctaagcagccaggacttcgacagcctgctgcagaggcaggagtcgagcgtcaggctctgcaaggtgctggcgctggtttttggctttgccacatgtgccaccctcttcttcattctccggaagcagtatctgcagcggcaggagcgcctgcgcctcaagcagatgcaggaggagttccaggagcatgaggcccagctgctgagccgagccaagcctgaggacagggagagtctgaagagcgcctgtgtagtgtgtctgagcagcttcaagtcctgcgtctttctggagtgtgggcacgtttgttcctgcaccgagtgctaccgcgccttgccagaacccaagaagtgccctatctgcagacaggcgatcacccgggtgatacccctgtacaacagctaatagtttggaagccgcacagcttgacctggaagcacccctgcccccttttcagggatttttatctcgaggcctttggaggagcagtggtgggggtagctgtcacctccaggtatgattgagggaggaattgggtagaaactctccaaacccatgcctccaatggcaggatgctgcctttcccacctgagaggggaccctgtccatgtgcagcctcatcagagcctcaccctgggaggatgccgtggcgtctcctcccaggagccagatcagtgcgagtgtgactgaaaatgcctcatcacttaagcaccaaagccagtgatcagcagctcttctgttcctgtgtcttctgtttttttctggtgaatcgttgcttgctgtggacttggtggaggactcagaggggaggaaaggctgggccccgagtacaacggatgccttgggtgctgcctccgaagagactctgccgcagcttttcttctttttcctcatgccccgggaaacagtctttcttcagaattgtcaggctgggcaggtcaacttgtgttcctttcccctcacctgcttgcctccttaacgcctgcacgtgtgtgtagaggacaaaagaaagtgaagtcagcacatccgcttctgcccagatggtcggggccccgggcaacagattgaagagagatcatgtgaagggcagttggtcaggcaggcctcctggtttcgccactggccctgatttgaactcctgccacttgggagagctcggggtggtccctggttttccctcctggagaatgaggcgcagaggcctcgcctcctgaaggacgcagtgtggatgccactggcctagtgtcctggcctcacagcttccttgcaaggctgtcacaaggaaaagcagccggctggcaccctgagcatatgccctcttggggctccctcatccagcccgtcgcagctttgacatcttggtgtactcatgtcgcttctccttgtgttaccccctcccagtattaccatttgcccctcacctgcccttggtgagccttttagtgcaagacagatggggctgttttcccccacctctgagtagttggaggtcacatacacagctctttttttattgcccttttctgcctctgaatgttcatctctcgtcctcctttgtgcaggcgaggaaggggtgccctcaggggccgacactagtatgatgcagtgtccagtgtgaacagcaggaattaaacatgttgcaacc

SEQ ID NO: 189 - DNA, 2146 bp, Homo sapiens
cggggacggtgcgccagtgccccctccgcgagccccaaccagtagacggttccctgtctcccgcgccccaatttcgattttcaaacgcaactcctacaggattctgagaccccgtcccatctcccatatcccatttccagctgcaaattactgcagaatctgaacccaggaaagaaacccatttgccgaccccctcttccctctccagacaggtggagagcgggtgagggtctcgctcggctttccccctgcacctttcccaccctcccgcccgtccctgggggtcctccgtcaccgcggccatggcccagaagccgaaggtggacccccacgtcgggcggctgggatacctgcaggcgctggtcacggaattccaggagacccaaagccaagacgccaaggagcaagtcctcgccaacctcgccaacttcgcttatgaccccagcaactacgagtatctgcggcagctgcaggtcctggatttatttctcgattcgctgtcggaggagaatgagaccctggtggagtttgctattggaggcctgtgcaacctgtgcccagacagggccaacaaggagcacatcctgcacgcaggaggtgtcccactcatcatcaactgcctatccagccccaatgaggagacggtgctgtctgccatcaccacgctcatgcacctgagcccgccgggccgcagctttctcccagagctgaccgccacgcccgtggtgcagtgcatgcttcgcttctccctctcggccagcgccaggctccggaacctggcacagatcttcctggaggacttctgctccccccgccaggtggccgaggcccgcagccggcaggcgcactctgccctgggtatcccactgccgaggagcgtggccccacggcagcgctgatccatggagactgcgagaccgtggcacccctactgctggggaccacagtcctgatgtggacgcagggaacggggagcacatactgccccattggtgccttttcagccatctgaaaggcgggttctttcagcaggacaggcatttacactgatgaaacgccactgggagtgaggaagccagactccagagacacggagaagatcaaactggagctgcgttcataggctggcactctcaatcctacatcaggtgccaccaccaccagactcaggccctggtgtaagaagcggccaagtgcctggacccagaggctttgcaggacagtgttctcaggagctgggcctgaggcttaggagagctgccttcgctgcaggaaatcagggattatcccttaacagaagtgtctggagtagttttcaggtataggaatgagatgcctcgtggtgaaaggatctcaccctgggaagatgtggtgccccctccagggctctggaggatggatgcctcccccaggggctctccaagctgggcatttgggcctggtggatgccaacctggataacctgtggcccagcattgactgtccacccagccttgctgttaggcaccatgactccaagatgaagatgtggtccctgcccttgagtgacagcccagggacttaatgtggccatcgggcatcaagcacaaggccatgcaggtgatgatacgtcggaatagaggcaccagccctggtaactgcatcttctccccttgccaccccatggccccggctgaaagcttcggccctcctctgctgtcactcaatgatggggagccctaccccagaagtgtatcccacgagggcatcagggacgcagtgagtgttgctcaagggagtcaggaagagacggcaacgtaaaggatgtggctccatgtccatggtgccccctggtcaacataaggagcgtgggatccgatggaaaggtggagctcagggaaaatgggggtccttgcctctcgtgtaccccctcaaggctgaccccttagatggcccaggaatggcaggtgctacaaaaatggtacccacgtgggcatggaaatggggcagattaggggaccactggactcagaggggagggaagggctcatcagcacccgctcagggagcctgtccctttatgttcccaaataaagggtcctagaagactagaaagccaaggtcttttattaaaggtcccgactggtaaaaaaaaaaaaaaaaaaaa

SEQ ID NO: 190 - DNA, 1781 bp, Homo sapiens
ggcgggtccgcggccgcggcgggaacatggaggagctgctgaggcgcgagctgggctgcagctctgtcagggccacgggccactcggggggcgggtgcatcagccagggccggagctacgacacggatcaaggacgagtgttcgtgaaagtgaaccccaaggcggaggccagaagaatgtttgaaggtgagatggcaagtttaactgccatcctgaaaacaaacacggtgaaagtgcccaagcccatcaaggttctggatgccccaggcggcgggagcgtgctggtgatggagcacatggacatgaggcatctgagcagtcatgctgcaaagcttggagcccagctggccgatttacaccttgataacaagaagcttggagagatgcgcctgaaggaggcgggcacagtggggagaggaggtgggcaggaggaacggccctttgtggcccggtttggatttgacgtggtgacgtgctgtggatacctcccccaggtgaatgactggcaggaggactgggtcgtgttctatgcccggcagcgcattcagccccagatggacatggtggagaaggagtctggggacagggaggccctccagctttggtctgctctgcagttaaagatccctgacctgttccgtgacctggagatcatcccagccttactccacggggacctctggggtggaaacgtagcagaggattcctctgggccggtgatttttgacccagcttctttctacggccactcggaatatgagctggcaatagctggcatgtttgggggctttagcagctccttttactccgcctaccacggcaaaatccccaaggccccaggattcgagaagcgccttcagttgtatcagctctttcactacttgaaccactggaatcattttggatcggggtacagaggatcctccctgaacatcatgaggaatctggtcaagtgagcgggccttactctggaaggaggcctcagaggtttctccacagtcctcttctgggcaaattcttgtttcttcacatgccggactagcttaagaccaatgcagtagcttatttccaagccttgcaaagtatataatatctaagaggaaaggttttgtcatcccagcgttgtccactttgtggggctttgtaggtagacggagccacactacaggcagggtatgagcagagggatgtatggagtgtgggtgactctgagcctcactgctgctgcaaggtggggaaactgtaagtgaacccctgtgggtgcgggggagggtatccggtgcacagggaggtggccagcgcccccgggcactgctgctcataggtacctttccgctgcctcctccctgctctcctgtgcaggaatgtctctgagctgttcacgttgatgcttcttggttggcaagacttgggtgtagatatgaaaccatcttactaaaagcgtcttaaaatgaccaattccagaatcaagcgtattccgttttcttcctgcatgatcctgggccctcccgcaggctgagcaagtctgtaaactgattctgggagaaaccaagctgctggccgtagggtgtccttgggtacatccaggagtcttcattgcttctgttattaccccgtctcctctgccattttctacagcttgctgagttgtcattcctttgcaacattaaaatacatgctgaactcatatttttccttccttcactgttgtagtaaagagacatatttcatgaatggcattgatgctaataaatcctttgcacaaaaaaaaaaaaaaaaaa

SEQ ID NO: 191 - DNA, 1978 bp, Homo sapiens
cactgtgctctgcgagccgaatcatggatcacactgacaatgagttacaaggcactaatagttctggatccttgggtggtcttgatgttcgcagacgaattcctataaagctcatctccaaacaagcaaacaaagcgaaacctgcaccgcgaactcaaagaactataaacaggatgcctgcaaaggctccacctggtgatgaagaaggatttgattataatgaagaagaacggtatgactgtaaagggggtgagctgtttgcaaatcagcgaagatttcctggacaccttttttgggactttcagataaacatcttaggtgaaaaggatgatacaccagttcatttctgtgacaagtgtggattgcctattaaaatctatgggagaatgattccatgcaagcatgttttttgctatgactgtgctattttacatgaaaaaaagggagataagatgtgtccaggctgtagtgatcctgtgcagcgaattgagcagtgtacacgaggttctctcttcatgtgtagcattgttcaagggtgcaagagaacatatttgtctcagagagacttacaggctcatatcaaccatcgccatatgagagctggaaaacctgttacccgtgcttcacttgaaaatgttcatcctcctattgccccaccaccaactgaaatccctgagcgttttataatgccaccagacaagcaccatatgagccatattccgccaaagcagcatatcatgatgccaccacctcctttgcaacatgtgccacatgagcactataatcagccacatgaggatattcgtgctcctccagcagaattgtccatggctccacctccacctcgatcggtcagtcaggaaacctttcgtatttcaacaagaaaacacagcaatttaataaccgtccctattcaggatgactcaaattcaggtgctagagaaccaccacctcctgccccagcacctgctcaccatcatcctgaatatcagggtcaaccagtggtatcgcaccctcatcatattatgcctccacagcaacattatgcaccacccccacctcctccaccaccaataagccatccaatgccacatcctccccaggctgcaggtactcctcacttggtatatagccaagctccacctccaccaatgacctctgctccaccaccaataacccctccccctggacatattattgcccagatgccaccttatatgaatcatcctcctccaggacctcccccgcctcaacatggtggtccacctgtaactgcaccccctcctcaccattataatcctaactcattaccccagttcactgaagatcaaggaactccgagccctccatttacacaaccagggggaatgagtcctggtatatggcctgcaccaagagggccaccaccacctccacgattgcagggtccgccttctcaaaccccacttcctggaccacatcatccagatcagacaagatatagaccgtattaccaatgataatagtattttgaatggaagatatgagggggaaaaaaacttatgtgtagtcaatcttttaagctttgactgttttgggaaggaagagtacctcttatcgaggtagtataaaacacatagggtcttgtttcttaaaatggttttaaatcttgaccttaagattgatttcaagtaccatactgtagtacagataagtggctcagttgagcacagctatattttaacatctctttgttcccctagtttagtaaattgacccagaggtgaccatttgtaaaaaatttgaaaaaatttttcattgttttacttcagaagtattgttttgttaaacccaacgtttagtttttcttgtgatacattttgttaacctgtgtaaaaggattaaatttcaatatggttgtaaaaaaaaaaaaaaaaaaaaaaaaaaaaaaaaaaaaaaaaaaaaaaaaaaaaaaaaaaaaaaaaaaaaaaaaaaaaaa

SEQ ID NO: 192 - DNA, 4113 bp, Homo sapiens
tgaggcgcgggaggcccgcgccccgcggctcgctgtgcgtgggagggcgcgagcgaacgcgggcgaggagcggccgagccgctgaagaggagctgggcgccggccgcccggccgcgctcggcccgcggatcgcctccgcccggtcttcgccggccccggcccctggcgagatgccgtgtggggaggattggctcagccacccgctgggaatcgtgcagggattcttcgcccaaaatggagttaatcctgactgggagaagaaagtaattgagtattttaaggaaaagctgaaggaaaataatgctcctaagtgggtaccatcactgaacgaagttccccttcattatttgaaacctaatagttttgtgaaatttcgttgcatgattcaggatatgtttgaccctgagttttacatgggagtttatgaaacggttaaccaaaacacaaaagcacatgttcttcattttggaaaatatagagatgtagcagagtgtgggcctcaacaagaacttgatttaaactctccacgaaataccactttggaaagacagactttctattgtgttccggtgcctggggaatctacgtgggtaaaagaagcctatgttaatgcaaaccaagctcgagtcagtccctcaacatcctacactcctagtcgccacaagaggagttatgaagatgatgacgatatggacctacagcccaataagcagaaagaccaacatgcaggtgccagacaagcagggagtgttggtggtcttcaatggtgtggagagccaaaacgtttagaaactgaagcttctactgggcaacagctgaactctctgaacttgtcttctccttttgatttgaattttccattgccaggagagaagggccctgcatgccttgtgaaggtttatgaagattgggattgtttcaaagtaaatgacattcttgagctatatggcatactgtctgtggatcctgtgctgagtatactgaataatgatgaaagggatgcctctgcactgctggatccgatggagtgcacagacacagcagaggagcagagagtacacagtcctcctgcttcattagtgccgagaattcatgtgatcttagcccagaagttgcaacacatcaacccattattgcctgcctgccttaacaaagaggagagcaaaacctgtaagtttgtttcaagtttcatgtccgaattgtctccagtcagagcagaacttcttgggttccttactcatgcccttctgggggatagtttggctgctgaataccttatattacatctcatctccacagtatatacaagaagagatgtccttccactaggaaaatttacagttaacttgagtggttgcccacggaatagtaccttcacagaacacttgtatcgaattattcaacatcttgttccagcatcttttcgtctgcagatgactatagagaacatgaaccatttgaaattcattccccacaaagactacacagccaatcgcttggtcagtgggctcctccagctgcccagcaatacttcccttgtaatcgatgagactctcctggaacaggggcagctggataccccaggtgttcataatgtgacagccctgagcaacctcataacgtggcagaaggtggattatgacttcagctaccatcagatggaattcccctgcaatattaacgttttcattacttcggaggggaggtcactcctcccggcagactgccagattcacttacagccccagctaattccaccaaacatggaggagtacatgaacagccttctctcagcggtgctgccttccgtgctgaacaaattccgcatttatctaactcttttgagattcttggaatatagcatatctgatgaaataaccaaggcagttgaagatgactttgtggaaatgcggaagaacgaccctcagagcatcactgctgatgatcttcaccagctgctcgtggtggctcggtgtctgtctctcagtgctggtcagacaacgctgtcaagagaacgatggctgagagcaaagcagctagagtctttaagaagaacgaggcttcagcagcaaaaatgtgtgaatggaaatgaactttaaagatgtaatacctatgaagagtaatgggcaaactgtagccacataattgtaaaattcagatattcatttataccacattgttttataggtaatttctatcacaaaccagtgacatttcctgaaatcaagcctggtaacacctgatgtttatatgatattcagtaaggacttttaccttactgatttcatggagcttttgaagtttgttttataataattatataaattagtaatgatgtaaaaaaagtatttgatattaaaagtttaatattgataatgttgctgattgtaccatttccttagcttcagctgagtcataggccagactgttgaaatgctgaaatgaagaaggttgttgcagtttcaaagtcagaggaatcgtgcttcggatttcttatgttttctagttctctgtttttccagttcacagtgggttggggtgcattcagtagtccatctttggggaacggaggcgtacttgccattgattcacatgactacatgaaattctgtactgtcatttcccagatgtttggccacagaaactttttcccacttaacatttgttaacagcctgcaaaactaaacttgtacatggcagtggttcccagacttttgtattttatggaccggtagtaatatttccaaaaatctggggtactataaggttgccaatttaccttgccaagtaatccgaataaatcactgtattatcaccatttttttcataaaaggaaaggacaatctatctctgaataagaggagtcctttaaacggaatgaatgtggcttttgggggcaaaagaaaccaagacactacattgtctttattttctcctatcccagtgcatttgagaaccatgcataagggaatgctgtgctacaaagctgtgcccaaatatgaaaacaaaataggaaacttaaaaagcaataccccctttagaaagtttttattttcttaaatgtcattgagttgctttgattctattggatttttggcattttttatgggatcatcagttggttccaagtatgttagatcagctaacatctgctactccagtaacagcctcgtacaactgcaggtaggttttctccagaccaattagttttaatagagcaaactaacaacagactgtagtagcatggttatggcaaccagaatcttcagaaaggttaggacattactttttaagctgtcagtggtatcaaataacttacctagttggaggcagataaaggatcccttacgttttttcctataaggcctaaattgaaattgttaaccaaggaaacagggtcagccttgaaaaatcaaggaattcattgtacctaataactgaagtaaaaataactagttgttcaacttttcctaaactcaaatctatttttataaacaaatgtaaataatgtttatattagagttgaactggttttcatttttataactggtagactagaccttccttaaacttttagaaataaaatgaaggcttcactggatttgtgaggataaaatacattttctttaattgtcctagagcaaagtacattagtcaccatgtgttttttgtgccaatgtaacttgtaatttaccaaagaaaaatacatacattgcttggtcttgcagaaaagttcccttgaaagaacctttccaataaataaaacgtcccaaattagcagtaccttgggctgtttttcatgagtaagaagattcaccatcccatgtgatctgtgtggaaaaagaccatgtcctcttggtggaagacatgagagagctgaactgaagtggaggaggtggtgcaagagggaccttcctgctcaaggcccgcccaggcagcggaatagagtgcagtgcttggctgcagaaaccctttgtccctcacctatatatacacggacagtcaagtttgttgctctaacgtaaggcacagcgttaatcctgtatggccaggaaactgagtagactcctgtgtaaccctgtttggaactttgccttcttaaaatgatttttc

SEQ ID NO: 193 - DNA, 2508 bp, Homo sapiens
ctttctgctgttaccgggagcgcggtggccacggaacgctgcccggagccgcgcgagggaggacccgacgcgcggcgtttacccagcgcagcgttccaccgctcgggtttggctggaatagctctccagacccccagctggccatgtggtgagttcagggcccaaatcaagtagtaccagcaatcagggaactcctatctgttttgaatggattcacaccagccacaagcctggaaagatggtgtcacaatctacagtcaggcaggattctcctgtggagccctgggaagggatcagcgatcactctggcattattgatggttcgcccagactcctgaacactgaccatcctccttgccaattagacatcaggctcatgaggcacaaagctgtctggattaacccccaggatgtgcagcaacagccgcaggacttgcaatctcaggtgccagcagcagggaacagtgggacccattttgtgacagatgctgcctctccctcaggcccttcaccttcgtgcctcggggactccctggcagagacaacgttgtctgaggataccacagactccgttggcagcgcttctccccatggctcgagtgaaaagagtagcagcttctctctgtcctcaacagaggtacacatggtccgcccaggatactctcatcgggtgtctctgcccacaagccctaggattttggccacctccccatatcctgagactgacagtgctttttttgagccttcccatctgacatctgctgctgatgaaggtgctgttcaagtcagtagaagaaccatttcttcgaattccttctcaccagaggtatttgtgctgcctgttgatgtagaaaaggaaaatgcccacttttatgttgcagatatgattatatcagcaatggagaaaatgaagtgtaacattctgagtcaacagcagacagagagctggagtaaagaagtcagtgggttacttgggagtgatcagcctgactctgaaatgacttttgataccaacataaagcaagagtctgggtcttctacttcttcatacagtggctatgaaggttgtgctgtgttacaggtcagcccagtgactgaaacacgtacttaccatgatgtgaaagagatttgcaaatgcgatgttgatgaatttgttattttagagcttggagattttaatgatatcacagaaacctgtagctgttcctgcagctcctctaagagtgtcacttatgagccagacttcaattctgcagaactattagccaaagagctgtaccgcgtgttccagaagtgctggatactgtcagtagttaattctcagctggcaggttccctgagtgcagctggctcgatagtcgtaaatgaagagtgtgtccgaaaagactttgaatccagtatgaatgtagtacaggaaattaaatttaagtctaggatcagagggactgaagactgggctcctcctagatttcaaatcatatttaatattcatccaccactcaagagggaccttgtggtggcagcccagaattttttctgtgccggctgtggaactccagtagagcctaagtttgtgaagcggctccggtactgcgaatacctagggaagtatttctgtgactgctgccactcatatgcagagtcgtgcatccctgcccgaatcctgatgatgtgggacttcaagaagtactacgtcagcaatttctccaaacagctgctcgacagcatatggcaccagcccattttcaatttgctgagcatcggccaaagcctgtatgcgaaagccaaggagctggacagagtgaaggaaattcaggagcagctcttccatatcaagaagctgttgaagacctgtaggtttgctaacagctgtgtcaaggaaagggctttatttgtgaattttgccagaatacgactgtcatcttcccatttcagacagcaacatgtagaagatgttcagcgtgcagggcttgctttcacaaacagtgcttccagtcctccgagtgcccccggtgtgcgaggatcacagcgaggagaaaacttctggaaagtgtggcctctgcagcaacatgatgcccctgagtactgtgaaaaagactgttcaacatgccttatgataacaccgatttgtgtctattattggtgacattgttttagatattgggtattgtatattaaggaaaaagatggtctatattctctttattgcatatacttaatgtttcaaaagaatgcagattctgtgtttaagcacagggctgatagttgtggttttgtttacaaatgttctgttttggctgctattggttttttaaagaggttttttatacttttgtatttgaatagttatgtttcactgatgctgagccagtttgtatgtgtgtgcatatatgtgaactgtaactgacaagatgaattactcagtttctctttctctaaagcttgtttgatgaaactggttggtcctttcagtgaacaaaaatatgaccccaaaaaaaaaaaaaaaaa

SEQ ID NO: 194 - DNA, 2620 bp, Homo sapiens
gcggctgcgctgctgggcgggggcgggagctggagccggagctggagccggggccggggcccgggtcagcgcttgagccgggagaagagtttgagatcgtggaccgaagccagctgcccggccaggcgacctgcggagcgcaacgaggccgcgggcggccgagggctggtcggcgcccatcctgaccctggcacgcagggccaccgggaacctgtcggcgagctgcgggagcgcgctgcgcgcggcgcggggctgggcggcggggacagcggggacggcacggcgcgcgcagcttctaagtgccagatgatggaggagcgtgccaacctgatgcacatgatgaaactcagcatcaaggtgttgctccagtcggctctgagcctgggccgcagcctggatgcggaccatgcccccttgcagcagttctttgtagtgatggagcactgcctcaaacatgggctgaaagttaagaagagttttattggccaaaataaatcattctttggtcctttggagctggtggagaaactttgtccagaagcatcagatatagcgactagtgtcagaaatcttccagaattaaagacagctgtgggaagaggccgagcgtggctttatcttgcactcatgcaaaagaaactggcagattatctgaaagtgcttatagacaataaacatctcttaagcgagttctatgagcctgaggctttaatgatggaggaagaagggatggtgattgttggtctgctggtgggactcaatgttctcgatgccaatctctgcttgaaaggagaagacttggattctcaggttggagtaatagatttttccctctaccttaaggatgtgcaggatcttgatggtggcaaggagcatgaaagaattactgatgtccttgatcaaaaaaattatgtggaagaacttaaccggcacttgagctgcacagttggggatcttcaaaccaagatagatggcttggaaaagactaactcaaagcttcaagaagagctttcagctgcaacagaccgaatttgctcacttcaagaagaacagcagcagttaagagaacaaaatgaattaattcgagaaagaagtgaaaagagtgtagagataacaaaacaggataccaaagttgagctggagacttacaagcaaactcggcaaggtctggatgaaatgtacagtgatgtgtggaagcagctaaaagaggagaagaaagtccggttggaactggaaaaagaactggagttacaaattggaatgaaaaccgaaatggaaattgcaatgaagttactggaaaaggacacccacgagaagcaggacacactagttgccctccgccagcagctggaagaagtcaaagcgattaacttacagatgtttcacaaagctcagaatgcagagagcagtttgcagcagaagaatgaagccatcacatcctttgaaggaaaaaccaaccaagttatgtccagcatgaaacaaatggaagaaaggttgcagcactcggagcgggcgaggcagggggctgaggagcggagccacaagctgcagcaggagctgggcgggaggatcggcgccctgcagctgcagctctcccagctgcacgagcaatgctcaagcctggagaaagaattgaaatcagaaaaagagcaaagacaggctcttcagcgcgaattacagcacgagaaagacacttcctctctactcagaatggagctgcaacaagtggaaggactgaaaaaggagttgcgggagcttcaggacgagaaggcagagctgcagaagatctgcgaggagcaggaacaagccctccaggaaatgggcctgcacctcagccagtccaagctgaagatggaagatataaaagaagtgaaccaggcactgaagggccacgcctggctgaaagatgacgaagcgacacactgtaggcagtgtgagaaggagttctccatttcccggagaaagcaccactgccggaactgtggccacatcttctgcaacacctgctccagcaacgagctggccctgccctcctaccccaagccggtgcgagtgtgcgacagctgccacaccctgctcctgcagcgctgctcctccacggcctcctgaacgtccgtcctcaggagcacagcctcacggacagtgccaaaccctgtgggtctccaggggcttgggaaatgtgttctttcccaagagaatcaaaggaaagaatcaaatttcttgcccggtcactggcattccagaagacagcgtgccggaaccggcagctctcacctttctgtgacttgttcggaattaactcctctggatggaaacttccatcttacttggttacatcacggctctggttcagatacaacttcatgattttgctactatcatttttcacttttcaaagaatttaacctattttacagcagttcagttctgctagtgagtagttttcctctcctaccttccttctaaaaacctgattcatgcacagcgtttgacacacatggagtctgccagtgtgccttctctgcttcagacaagagatctgccatttcatgcccttgtgactacctatcattggccctgcaataaaatcatttatttttcaaaaaaaaaaaaaaaaaaa

SEQ ID NO: 195 - DNA, 1931 bp, Homo sapiens
cgaaagcgcgtctgcggccgcaatgtctgctgagagttgtagttctgtgccctatcacggccactcccatttctggtgccgtcacgggacagagcagtcggtgacaggacagagcagtcggtgacgggacacagtggttggtgacgggacagagcggtcggtgacagcctcaagggcttcagcaccgcgcccatggcagagccagaccgactcagattcagactctgagggaggagccgctggtggagaagcagacatggacttcctgcggaacttattctcccagacgctcagcctgggcagccagaaggagcgtctgctggacgagctgaccttggaaggggtggcccggtacatgcagagcgaacgctgtcgcagagtcatctgtttggtgggagctggaatctccacatccgcaggcatccccgactttcgctctccatccaccggcctctatgacaacctagagaagtaccatcttccctacccagaggccatctttgagatcagctatttcaagaaacatccggaacccttcttcgccctcgccaaggaactctatcctgggcagttcaagccaaccatctgtcactacttcatgcgcctgctgaaggacaaggggctactcctgcgctgctacacgcagaacatagataccctggagcgaatagccgggctggaacaggaggacttggtggaggcgcacggcaccttctacacatcacactgcgtcagcgccagctgccggcacgaatacccgctaagctggatgaaagagaagatcttctctgaggtgacgcccaagtgtgaagactgtcagagcctggtgaagcctgatatcgtcttttttggtgagagcctcccagcgcgtttcttctcctgtatgcagtcagacttcctgaaggtggacctcctcctggtcatgggtacctccttgcaggtgcagccctttgcctccctcatcagcaaggcacccctctccacccctcgcctgctcatcaacaaggagaaagctggccagtcggaccctttcctggggatgattatgggcctcggaggaggcatggactttgactccaagaaggcctacagggacgtggcctggctgggtgaatgcgaccagggctgcctggcccttgctgagctccttggatggaagaaggagctggaggaccttgtccggagggagcacgccagcatagatgcccagtcgggggcgggggtccccaaccccagcacttcagcttcccccaagaagtccccgccacctgccaaggacgaggccaggacaacagagagggagaaaccccagtgacagctgcatctcccaggcgggatgccgagctcctcagggacagctgagccccaaccgggcctggccccctcttaaccagcagttcttgtctggggagctcagaacatcccccaatctcttacagctccctccccaaaactggggtcccagcaaccctggcccccaaccccagcaaatctctaacacctcctagaggccaaggcttaaacaggcatctctaccagccccactgtctctaaccactcctgggctaaggagtaacctccctcatctctaactgcccccacggggccagggctaccccagaacttttaactcttccaggacagggagcttcgggcccccactctgtctcctgcccccgggggcctgtggctaagtaaaccatacctaacctaccccagtgtgggtgtgggcctctgaatataacccacacccagcgtagggggagtctgagccgggagggctcccgagtctctgccttcagctcccaaagtgggtggtgggcccccttcacgtgggacccacttcccatgctggatgggcagaagacattgcttattggagacaaattaaaaacaaaaacaactaacaaaaaaaaaaaaaaaaaaaaaaa

SEQ ID NO: 196 - DNA, 4770 bp, Homo sapiens
ccaaggtcagaatcgccacctgaggcctgaatatcagcgtaagatagtgtccaaagcagtcttaagaagaggtcccattaccccactctttccgccctaatggaggtctccagtttaggtaaataaaaggattgttgggaggtggagggaaagaactactatttccaacatgcattgcggaacgaaaggccttggccacactgttccttggaaactgtagtcttatggagaggaacatccaataccaaagcgggcacaattctcacggaaatccagtggatagattggagacctccgcgggcttatacatgtcaacagtaatggattggagtgttgttatgttctcctatcttgagagcagagactaggccaaaaaaagatacctacaactcctaggaagactacgattcccatccagccccacgagtctcgggcaagtagtcctctaagcctcacagcatggaaccacaggttactctaaatgtgacttttaaaaatgaaattcaaagctttctggtttctgatccagaaaatacaacttgggctgatatcgaagctatggtaaaagtttcatttgatctgaatactattcaaataaaatacctggatgaggaaaatgaagaggtatccatcaacagtcaaggagaatatgaagaagcgcttaagatggcagttaaacagggaaaccaactgcagatgcaagtccacgaagggcaccatgtcgttgatgaagccccacccccagttgtaggagcaaaacgactagctgccagggcagggaagaagccacttgcacattactcttcactggtgagagtcttgggatcagacatgaagaccccagaggatcctgcagtgcagtcgtttccacttgttccatgtgacacagaccagcctcaagacaagcccccagactggttcacaagctacctggagacgttcagagaacaagtggttaacgaaacggttgagaagcttgaacagaaattacatgaaaagcttgtcctccagaacccatccttgggttcttgtccctcagaagtctcaatgcctacttcagaagaaacattgtttttgccagaaaaccagttcagctggcatattgcttgcaacaactgccaaagaaggattgttggtgtccgctaccagtgtagcctatgcccatcctacaatatctgtgaagattgtgaagcagggccatatggccatgacactaaccacgtcctgctgaagttgcggagacctgttgtgggctcctctgaaccgttctgtcactcaaagtactctactcctcgtcttcctgctgctctggaacaagtcaggctccagaaacaggttgataagaactttcttaaagcagaaaagcaaaggttgcgagctgagaagaaacaacgtaaagcagaggtcaaggaacttaaaaagcagcttaaactccataggaaaattcacctgtggaattcaatccatggactccagagccccaagtctcctttaggccgacctgagagcttgctccagtctaataccctgatgctccctttgcagccctgtacctccgttatgccaatgctcagtgcagcatttgtggatgagaatttgcctgatgggactcaccttcagccaggaaccaagtttatcaaacactggaggatgaaaaatacaggaaatgtaaagtggagtgcagacacaaagctcaagttcatgtggggaaacctgactttggcttccacagaaaagaaggatgttttggttccctgcctcaaggccggccatgtgggagttgtatctgtggagttcattgccccagccttggagggaacgtatacttcccattggcgtctttctcacaaaggccagcaatttgggcctcgggtctggtgcagtatcatagtagatcctttcccctccgaagagagccctgataacattgaaaagggcatgatcagctcaagcaaaactgatgatctcacctgccagcaagaggaaacttttcttctggctaaagaagaaagacagcttggtgaagtgactgagcagacagaagggacagcagcctgcatcccacagaaggcaaaaaatgttgccagtgagagggagctctacatcccatctgtggatcttctgactgcccaggacctgctgtcctttgagctgttggatataaacattgttcaagagttggagagagtgccccacaacacccctgtggatgtgactccctgcatgtctcctctgccacatgacagtcctttaatagagaagccaggcttggggcagatagaggaagagaatgaaggggcaggatttaaagcacttcctgattctatggtgtcagtaaagaggaaggctgagaacattgcttctgtggaggaagcagaagaagacctgagtgggacccagtttgtgtgtgagacagtaatccgatcccttaccttggatgctgccccagaccacaaccctccttgcagacagaagtccttgcagatgacatttgccttgcctgaaggaccacttggaaatgagaaggaggagattatccatatcgctgaggaagaagctgtcatggaggaggaggaggatgaggaggatgaggaggaggaggatgagctcaaagatgaagttcaaagtcagtcctctgcttcctcagaggattacatcatcatcctgcctgagtgctttgataccagccgccccctgggggattctatgtacagctctgcgctctcacagccaggcctggagcgaggtgctgaaggcaagcctggggttgaggctgggcaggaaccagctgaggctggggaaagactccctggaggggagaaccagccacaggagcacagcataagtgacatcctcacgacctcacagactctggaaacagtgcccctaatcccagaggtagtggagcttccaccgtcactgcccaggagctctccttgtgtacatcatcatggttccccaggagtggatttaccagttaccataccagaagtttcttcagtccctgatcagatcagaggagagcccagaggctcatcaggacttgtaaacagcagacagaagagctatgaccactcaaggcaccatcatgggagcagcattgctggaggactggtgaagggggctttgtctgttgctgcctctgcatacaaggccctgtttgctgggccaccagtcactgcacagccaataatttctgaagatcagacagcagccctgatggcccatctctttgaaatgggattctgtgacaggcagctgaacctacggctgctgaagaaacacaattacaatatcctgcaggttgtgacagaacttcttcagttaaacaacaacgactggtacagccaacgctattgaggagtgaccttgtattaaataactgcctgctgctcagagatgatctttattctgtcattggggtatgggatagaagcccttgcttatttttaatctgatgaatctgtatagagcccatcgttgagttaccaagacaatacctgctacagtattttggggagcaaactaaagaccagaacttaaattttcactttagacattggatgaatagtatgaagacagtttttcagttgatttggataaaactattttagtgcattgacaagtgtaacttcaacttcatatagaaccatttttctttctgcttttattgaaactgagtatttttctttggctaatgtggattttttatggggatatctgttaattttcaggttttgaaagacattaacctcggaagttgtttttaagaattattctcataattcttattctcataatttctgtaatccacctcaagcttcatagttatttggcattgaaataacacccagagcatgatagaaatgttgttactcttcctctctcaaggagaaagtaattttcctgcaatacttaataattggcaccgttgctttctaaagactccatggtgcattcaagagtatccaacttcaagggaatctccgcatttcaatgaaaggaggaagagtgtgctgataaacctaccagcacctattgagcaatgtctattatagtaattttgcatacatttttatttaagggaaaaaatataggtattgtgaaatattttgctaatcttatagaaaaggaaaaaatcccgttatttaaagggaaaagtaaatttaacagttgccttttttcttaatgtcagggcagatcttattttacagtacagtgggggaaatagaaaacatgtgaaaggcaaaaggcaggctcctaaattaatgtcagtgaagttcagggtgggcaaatgagtgtgtgtgaggtataggaaatgctgatgacttctttaatgcttgaagtccgttcacaggtatctagccctagaatgcctagaacaggaagaggcagctggtgttctgcaaaacttggacaggggcaaagttgctgaaaaagttttggtttaacccgaagataagtggaaaagagcttgtccatgaacccaggttctcactctgtttacagaagtgtgttgagtacagttggtgaaggaagaggtaacaaaaaatgctaaatattttatccatgaaaatgacttccagaaaaggaagaatatgaaccccagaccgaaggggaaaagatagttaatagtattatctaacctggttggtatttgtaatgaatggtgattttaattagtcattagccataatgatgtttatttacagtataactcctgaatgctacttaaataaaccaggattcaaactgcaaaaaaaaaaaaaa

SEQ ID NO: 197 - DNA, 1803 bp, Homo sapiens
gcacaggcaccgcgtggttctcacaaccagcagctcggctcactgagacccggtggtccagacgctgctcctggctggggtggcgctgcagggagaaccgcgagctctcaggggtcggcgggtgacttctttccggaagaaagcgaggaacgcgctctgcggggtgagccggactccccaactccggacgatcagcccaggactgagagccccgaagtccccaaccacaagtaagcggccccagaaggacaagtctaggtcgccgtccagagcgccatggccgcgcccgcccttcgtttgtgccacatcgccttccacgtgcccgccgggcagcccctagcccggaacctgcagcgcctcttcggcttccagcccctggcttcgcgggaggtggacggctggcggcagctagccctgcgcagcggcgacgcggtctttttggtgaacgagggcgcagggtctggagagccgctgtacggcctggatccgcgtcacgccgtgcccagcgccacaaacctgtgcttcgacgtggcggacgccggcgctgcaacccgggagctggcagcgctgggctgcagcgtgcctgtccctcccgttcgcgtgcgggacgcgcagggtgccgccacttacgccgtggtcagctcgcctgccggcatcctcagcctgaccttgctggagcgcgctggctaccgcggacccttcctacccggcttcaggcccgtgtcctctgcgcctggccccgggtgggtcagccgcgtggaccacctgaccttggcctgcacccccggcagctcccccacacttttgcgctggttccacgactgcctgggcttttgccacttgccgctgagcccaggtgaggatcccgagctgggcctcgaaatgacagcagggtttgggcttgggggactgaggcttacagccctgcaggcccagccgggcagcattgtccccactcttgttctggctgagtcccttccgggggcgacgacacgacaggaccaggtggagcagttcctggcccggcacaaggggccaggcctgcagcacgtggggctgtatacgcctaacattgtggaggccactgagggggtggcaactgctggaggccagttcctggctccccctggggcatactaccagcagccaggaaaggagaggcagatccgagctgcagggcacgagcctcatctgcttgctcgacaggggatcctgctagatggtgataaaggcaagtttctgcttcaggtcttcaccaagtccctttttactgaggacactttcttcctggagctgattcagaggcagggggccactggctttggtcagggcaacatcagagctctgtggcagtccgtacaggagcaatctgccaggagccaggaagcctaaggatgcccagggctgggtgcagccagctgtcctgcagctctggggagaccagcacagaactgaggaacatctgcaggaggcccaactagtgaaaggctttgcctccggggggcaggtgtgacttccatttcatcagtgcctgccagaagctgtgtctctcattgggctccaaagaggtgggattttttaaaactaaaacatttcttatatacagtctataataaatatgtaagatacaaagaacaataaaagaattacacactaggaaatagaacataaccaatactttcgagtcctccctgtgtcccgctgtgattctatttcctcccacccactcctcaaatcctgtcattattagccctttgcttttctgtattgtttcactccgtatgtaacataaccctaaataaa

SEQ ID NO: 198 - DNA, 2060 bp, Homo sapiens
ccggagccggccttcgggaggcgcggcccgggaggaggcctgggcctgcgggccgggagcagcaggggcggcccgcgggagggagcggaagtcccgggacgggcgcgggcagcggcgcgagcagggcgggcgagttccgcgctccctccccatggccgggagcgggccgcggcgacggcggcggcgctgacaggccccgggcggggcggggcaggcggcctggacgggggcctggggctgtgggaagatgaacgccctcctagagcagaaggagcagcaggagaggctgcgggaggccgcggccttaggggacattcgggaggtgcagaaactggtggagagcggggtggatgtgaactcccaaaatgaggtcaacggctggacttgtttacactgggcatgtaaacgaaaccatggtcaggtggtctcttacctgttaaaatcaggagctgacaaagaaattcttaccacaaaaggagaaatgccagtccagttaacatcaaggagagaaatcaggaagattatgggagtggaagaagaagatgatgatgatgatgatgatgacaacctcccccagctgaagaaggagtcagaactgccctttgttcccaactatttggccaacccagccttcccttttatctatacacccacagcagaggattcagcccagatgcagaatgggggcccctccacaccccctgcatcaccccctgcagatggctcacctccattgcttccccctggggaacctcccctgttagggacctttccccgggaccacacctctttggcactagttcagaatggtgatgtgtcggccccctctgccatactcagaacaccagaaagcacaaaaccgggtcctgtttgtcagccaccagtgagtcagagccgctccctgttttcttctgtcccgtccaagccaccaatgtctctggagcctcaaaatgggacgtatgcaggaccagcgccagcattccagccatttttcttcactggagcatttccatttaatatgcaagagctggtactcaaggtgagaattcagaacccatctcttcgagaaaatgatttcattgaaattgaactggaccgacaggagctcacctaccaagagttgctcagagtgtgttgctgtgagctgggtgttaatccagatcaagtggagaagatcagaaagttacccaatactctgttaaggaaggacaaggatgttgctcgactccaagatttccaggagctggaactggttctgatgataagtgaaaataattttctgttcagaaatgctgcatccacactgactgaaaggccttgctataacaggagagcttcaaaactgacttactaatgcagcagggacttttatcactgagtattatgacagtgtgcatcacctctgggccaaggacaagccattgatctaaatgcctcagatgcccgggagggcctctggtgccactgcatagtatatactaacatcattctgccaaggtaggaagcccctgacccccaagcagtggtgccactcttccaagcctcttggtgcacagtaaacctattgcttgaagctttgaacagctgagaagtggtctggagaggcagaagctgaaggttctatatccagtgtgttttatgtccagaatgtaagagagttgtctaagcagcagctgagagagagcggagcctatttctagccactcctgttgacagtgcacctgaagggctgggatgcgtttttcttggtgttgcatgctcacaactctgctgacattgggaacttatgagagaggaagactcgggaaagcacagatactggacagatggattctggtgtggggaaagcacagatactggacagatggattctagtgtgacttgtgactgtgaggtttcctataacatatttataaatgttactcaggttaaaagtatttaagaatacagttaactaattgtaaatatgctgttaaccaaaagagctttccctccctcactttttcctttgtaaacactcatgactgctaaaaaaaaaaaaaaaaaaaaaaaaaaaaaaa

SEQ ID NO: 199 - DNA, 5195 bp, Homo sapiens
ctcagggatttgctctcccctgaagtttctttcttacccagccccttttcctcctgctactttcctttttccctacactggttgcagggggagggagcctgccagctgcgaggacctctgtggtggaggagttggtgctgatggtggtggtagtgaccgctatgggtccctgaggcctggctggccagcaagagggcagggttggctagaggaggaagacggcgaggacgtgcgaggggtgctgaagaggcgcgtggagacgaggcagcacactgaggaggcgatccgccagcaggaggtggagcagctggacttccgagacctcctggggaagaaggtgagtacaaagaccctatcggaagacgacctgaaggagatcccagccgagcagatggatttccgtgccaacctgcagcggcaagtgaagccaaagactgtgtctgaggaagagaggaaggtgcacagcccccagcaggtcgattttcgctctgtcctggccaagaaggggacttccaagacccccgtgcctgagaaggtgccaccgccaaaacctgccaccccggattttcgctcagtgctgggtggcaagaagaaattaccagcagagaatggcagcagcagtgccgagaccctgaatgccaaggcagtggagagttccaagcccctgagcaatgcacagccttcagggcccttgaaacccgtgggcaacgccaagcctgctgagaccctgaagccaatgggcaacgccaagcctgccgagaccctgaagcccatgggcaatgccaagcctgatgagaacctgaaatccgctagcaaagaagaactcaagaaagacgttaagaatgatgtgaactgcaagagaggccatgcagggaccacagataatgaaaagagatcagagagccaggggacagccccagccttcaagcagaagctgcaagatgttcatgtggcagagggcaagaagctgctgctccagtgccaggtgtcttctgaccccccagccaccatcatctggacgctgaacggaaagaccctcaagaccaccaagttcatcatcctctcccaggaaggctcactctgctccgtctccatcgagaaggcactgcctgaggacagaggcttatacaagtgtgtagccaagaatgacgctggccaggcggagtgctcctgccaagtcaccgtggatgatgctccagccagtgagaacaccaaggccccagagatgaaatcccggaggcccaagagctctcttcctcccgtgctaggaactgagagtgatgcgactgtgaaaaagaaacctgcccccaagacacctccgaaggcagcaatgccccctcagatcatccagttccctgaggaccagaaggtacgcgcaggagagtcagtggagctgtttggcaaagtgacaggcactcagcccatcacctgtacctggatgaagttccgaaagcagatccaggaaagcgagcacatgaaggtggagaacagcgagaatggcagcaagctcaccatcctggccgcgcgccaggagcactgcggctgctacacactgctggtggagaacaagctgggcagcaggcaggcccaggtcaacctcactgtcgtggataagccagaccccccagctggcacaccttgtgcctctgacattcggagctcctcactgaccctgtcctggtatggctcctcatatgatgggggcagtgctgtacagtcctacagcatcgagatctgggactcagccaacaagacgtggaaggaactagccacatgccgcagcacctctttcaacgtccaggacctgctgcctgaccacgaatataagttccgtgtacgtgcaatcaacgtgtatggaaccagtgagccaagccaggagtctgaactcacaacggtaggagagaaacctgaagagccgaaggatgaagtggaggtgtcagatgatgatgagaaggagcccgaggttgattaccggacagtgacaatcaatactgaacaaaaagtatctgacttctacgacattgaggagagattaggatctgggaaatttggacaggtctttcgacttgtagaaaagaaaactcgaaaagtctgggcagggaagttcttcaaggcatattcagcaaaagagaaagagaatatccggcaggagattagcatcatgaactgcctccaccaccctaagctggtccagtgtgtggatgcctttgaagaaaaggccaacatcgtcatggtcctggagatcgtgtcaggaggggagctgtttgagcgcatcattgacgaggactttgagctgacggagcgtgagtgcatcaagtacatgcggcagatctcggagggagtggagtacatccacaagcagggcatcgtgcacctggacctcaagccggagaacatcatgtgtgtcaacaagacgggcaccaggatcaagctcatcgactttggtctggccaggaggctggagaatgcggggtctctgaaggtcctctttggcaccccagaatttgtggctcctgaagtgatcaactatgagcccatcggctacgccacagacatgtggagcatcggggtcatctgctacatcctagtcagtggcctttcccccttcatgggagacaacgataacgaaaccttggccaacgttacctcagccacctgggacttcgacgacgaggcattcgatgagatctccgacgatgccaaggatttcatcagcaatctgctgaagaaagatatgaaaaaccgcctggactgcacgcagtgccttcagcatccatggctaatgaaagataccaagaacatggaggccaagaaactctccaaggaccggatgaagaagtacatggcaagaaggaaatggcagaaaacgggcaatgctgtgagagccattggaagactgtcctctatggcaatgatctcagggctcagtggcaggaaatcctcaacagggtcaccaaccagcccgctcaatgcagaaaaactagaatctgaagaagatgtgtcccaagctttccttgaggctgttgctgaggaaaagcctcatgtaaaaccctatttctctaagaccattcgcgatttagaagttgtggagggaagtgctgctagatttgactgcaagattgaaggatacccagaccccgaggttgtctggttcaaagatgaccagtcaatcagggagtcccgccacttccagatagactacgatgaggacgggaactgctctttaattattagtgatgtttgcggggatgacgatgccaagtacacctgcaaggctgtcaacagtcttggagaagccacctgcacagcagagctcattgtggaaacgatggaggaaggtgaaggggaaggggaagaggaagaagagtgaaacaaagccagagaaaagcagtttctaagtcatattaaaaggactatttctctaaaactcaaaaaaaaaaaaaaaactcaagatagtaaaagcacctagtgtgatagattatcggttaggtcatttgtgggttgattcttcagaaacagcagttgatacctagcagcgttattgatgggcattaatctatgttagttggcaccttaagatactagtgcagctagatttcatttagggaaatcaccagtaacttgactgaccaattgattttagagagaaagtaaccaaaccaaatatttatctgggcaaagtcataaattctccacttgaatgcgctcatgaaaaataaggccaaaacaagagttctgggccacagctcagcccagagggttcctggggatgggaggcctctctctccccaccccctgactctagagaactgggttttctcccagtactccagcaattcatttctgaaagcagttgagccactttattccaaagtacactgcagatgttcaaactctccatttctctttccccttccacctgccagttttgctgactctcaacttgtcatgagtgtaagcattaaggacattatgcttcttcgattctgaagacaggtccctgctcatggatgactctggcttccttaggaaaatatttttcttccaaaatcagtaggaaatctaaacttatcccctctttgcagatgtctagcagcttcagacatttggttaagaacccatgggaaaaaaaaaatccttgctaatgtggtttcctttgtaaaccaggattcttatttgtgctgttatagaatatcagctctgaacgtgtggtaaagatttttgtgtttgaatataggagaaatcagtttgctgaaaagttagtcttaattatctattggccacgatgaaacagatttcaactgataaagagctggagaactccatgtactttggaatctcctccaagatagccagagtttaatacatcttcattctcaacactctccaaagaacttgacctaccttatgggttccatatttttcttcttaaatgtgcatcaatcatgccttgcccccaacctttaaatatattcttagacctggtaaatgcactcagacttgcgtctttaggaatttttaactttctttcactacattggcacttaaattttttctttataaagctttttgaaggtcataaacaaagaccataattgatgatagacctaatacatttcctctgtgtgtgtgtgtaacattccaaatactttttttttcttttccactgtttgtaaggtgcaacaatttaatatttttaagggactttttaagagttccttaagaaccaatttaaaattacttcagtgcaatcctacacagtatcaacattagaattttgatattagtcttatgttatcttccattctatttttatctgctttttgctgctagtttcaaactgccagtatttttccttttgcttttaaaatagttacaatatttttcatgatagccacagtattgccacagtttattataataaagggtttttatttgatttagcgcattcaaagcttttttctatcacttttgtgttcagaatataacctttgtgtgcgtgtatgttgtgtgtgtgcatgtgtggcgtatatgtgtgttacaggttaatgccttcttggaattgtgttaatgttctcttggtttattatgccatcagaatggtaaatgagaacactacaactgtagtcagctcacaatttttaaataaaggataccacagtgcatgctgtttgttcaaaaaaaaaaaaaaaaaa

SEQ ID NO: 200 - DNA, 2096 bp, Homo sapiens
acagcgcaagccccacgccacgcgtcgctggtcccaggcagcgagtcgctcgcgcgccccgccgcccgcctggcgacagctccgccgcgcacgcacatggaggggagcgcgagccccccggaaaagccccgcgcccgccctgcggctgccgtgctgtgccggggcccggtagagccgctggtcttcctggccaactttgccttggtcctgcagggcccgctcaccacgcagtatctgtggcaccgcttcagcgccgacctcggctacaatggcacccgccaaagggggggctgcagcaaccgcagcgcggaccccaccatgcaggaagtggagacccttacctcccactggaccctctacatgaacgtgggcggcttcctggtggggctcttctcgtccaccctgctgggagcttggagcgacagtgtgggccgccgcccgctgctagtgctggcctcgctgggcctgctgctccaggccctagtgtccgtttttgtggtgcagctgcagctccacgtcggctacttcgtgctgggtcgcatcctttgtgccctcctcggcgacttcggtggccttctggctgctagctttgcgtccgtggcagatgtcagctccagtcgcagccgcaccttccggatggccctgctagaagccagcatcggggtggctgggatgctggcaagcctcctcgggggccactggctccgggcccagggttatgccaaccccttctggctggccttggccttgctgatagccatgactctctatgcagctttctgctttggtgagaccttaaaggagccaaagtccacccggctcttcacgttccgtcaccaccgatccattgtccagctctatgtggctcccgccccagagaagtccaggaaacatttagccctctactcactggccatcttcgtggtgatcactgtgcactttggggcccaggacatcttaaccctttatgaactaagcacacccctctgctgggactccaaactaatcggctatggttctgcagctcagcatctcccctacctcaccagcctgctggccctgaagctcctgcagtactgcctggccgatgcctgggtagctgagatcggcctggccttcaacatcctggggatggtggtctttgcctttgccactatcacgcctctcatgttcacaggatatgggttgcttttcctgtcattagtcatcacacctgtcatccgggctaaactctccaagctggtgagagagacagagcagggtgctctcttttctgctgtggcctgtgtgaatagcctggccatgctgacggcctccggcatcttcaactcactctacccagccactctgaactttatgaaggggttccccttcctcctgggagctggcctcctgctcatcccggctgttctgattgggatgctggaaaaggctgatcctcacctcgagttccagcagtttccccagagcccctgatctgcctggaccagaagacagagggcaagaggagcaaagtgaacaccaagcaactggaggtctgcagctggaagcccagcccacagcaggacaagcaactcttgtctaagggcagtgctctctttggacgaggtagtcaagagagaccaaggcaccaccccatccacagctgacccagcctctgtctaggatctagaatcataacccacacaggcccactgcaggacaggtggcagaggagctatttgggacaggagtcagttctccctttctgctatccatcacttataaccccacaggccagaggagaggtcctgagagaggtgacacttcggggaccagaggcagcacgagggctggcatctctccttccagcccaaactgcacagccccaaccaggttcccaacacgtgtagcagtcatcagccattccttaacaatgaatgtggtacctggttagtgccagccttgggaaggagggagggaggtaagaggggcttggtgatctctggaggaagagtgttgcctttgctgtggttggggaatcgatccttggctatggcctacccactcccctggctgaagagtgccaatcattacaaatcagcttcagcaaactg

SEQ ID NO: 201 - DNA, 5164 bp, Homo sapiens
ccaagatggtggcgctgggctcggggtgactacaggagacgacggggccttttcccttcgccaggacccgacacaccaggcttcgctcgctcgcgcacccctccgccgcgtagccatccgccagcgcgggcgcccgccatccgccgcctacttacgcttcacctctgccgacccggcgcgctcggctgcgggcggcggcgcctccttcggctcctcctcggaatagctcgcggcctgtagcccctggcaggagggcccctcagccccccggtgtggacaggcagcggcggctggcgacgaacgccgggatttcggcggccccggcgctccctttcccggcctcgttttccggataaggaagcgcgggtcccgcatgagccccggcggtggcggcagcgaaagagaacgaggcggtggcgggcggaggcggcgggcgagggcgactacgaccagtgaggcggccgccgcagcccaggcgcgggggcgacgacaggttaaaaatctgtaagagcctgattttagaattcaccagctcctcagaagtttggcgaaatatgagttattaagcctacgctcagatcaaggtagcagctagactggtgtgacaacctgtttttaatcagtgactcaaagctgtgatcaccctgatgtcaccgaatggccacagcttgtaaaagatcaggagaacctcagtctgacgacattgaagctagccgaatgaagcgagcagctgcaaagcatctaatagaacgctactaccaccagttaactgagggctgtggaaatgaagcctgcacgaatgagttttgtgcttcctgtccaacttttcttcgtatggataataatgcagcagctattaaagccctcgagctttataagattaatgcaaaactctgtgatcctcatccctccaagaaaggagcaagctcagcttaccttgagaactcgaaaggtgcccccaacaactcctgctctgagataaaaatgaacaagaaaggcgctagaattgattttaaagatgtgacttacttaacagaagagaaggtatatgaaattcttgaattatgtagagaaagagaggattattcccctttaatccgtgttattggaagagttttttctagtgctgaggcattggtacagagcttccggaaagttaaacaacacaccaaggaagaactgaaatctcttcaagcaaaagatgaagacaaagatgaagatgaaaaggaaaaagctgcatgttctgctgctgctatggaagaagactcagaagcatcttcctcaaggataggtgatagctcacagggagacaacaatttgcaaaaattaggccctgatgatgtgtctgtggatattgatgccattagaagggtctacaccagattgctctctaatgaaaaaattgaaactgcctttctcaatgcacttgtatatttgtcacctaacgtggaatgtgacttgacgtatcacaatgtatactctcgagatcctaattatctgaatttgttcattatcgtaatggagaatagaaatctccacagtcctgaatatctggaaatggctttgccattattttgcaaagcgatgagcaagctaccccttgcagcccaaggaaaactgatcagactgtggtctaaatacaatgcagaccagattcggagaatgatggagacatttcagcaacttattacttataaagtcataagcaatgaatttaacagtcgaaatctagtgaatgatgatgatgccattgttgctgcttcgaagtgcttgaaaatggtttactatgcaaatgtagtgggaggggaagtggacacaaatcacaatgaagaagatgatgaagagcccatccctgagtccagcgagctgacacttcaggaacttttgggagaagaaagaagaaacaagaaaggtcctcgagtggaccccctggaaactgaacttggtgttaaaaccctggattgtcgaaaaccacttatcccttttgaagagtttattaatgaaccactgaatgaggttctagaaatggataaagattatacttttttcaaagtagaaacagagaacaaattctcttttatgacatgtccctttatattgaatgctgtcacaaagaatttgggattatattatgacaatagaattcgcatgtacagtgaacgaagaatcactgttctctacagcttagttcaaggacagcagttgaatccatatttgagactcaaagttagacgtgaccatatcatagatgatgcacttgtccggctagagatgatcgctatggaaaatcctgcagacttgaagaagcagttgtatgtggaatttgaaggagaacaaggagttgatgagggaggtgtttccaaagaattttttcagctggttgtggaggaaatcttcaatccagatattggtatgttcacatacgatgaatctacaaaattgttttggtttaatccatcttcttttgaaactgagggtcagtttactctgattggcatagtactgggtctggctatttacaataactgtatactggatgtacattttcccatggttgtctacaggaagctaatggggaaaaaaggaacttttcgtgacttgggagactctcacccagttctatatcagagtttaaaagatttattggagtatgaagggaatgtggaagatgacatgatgatcactttccagatatcacagacagatctttttggtaacccaatgatgtatgatctaaaggaaaatggtgataaaattccaattacaaatgaaaacaggaaggaatttgtcaatctttattctgactacattctcaataaatcagtagaaaaacagttcaaggcttttcggagaggttttcatatggtgaccaatgaatctcccttaaagtacttattcagaccagaagaaattgaattgcttatatgtggaagccggaatctagatttccaagcactagaagaaactacagaatatgacggtggctataccagggactctgttctgattagggagttctgggaaatcgttcattcatttacagatgaacagaaaagactcttcttgcagtttacaacgggcacagacagagcacctgtgggaggactaggaaaattaaagatgattatagccaaaaatggcccagacacagaaaggttacctacatctcatacttgctttaatgtgcttttacttccggaatactcaagcaaagaaaaacttaaagagagattgttgaaggccatcacgtatgccaaaggatttggcatgctgtaaaacaaaacaaaacaaaataaaacaaaaaaaaggaaggaaaaaaaaagaaaaaatttaaaaaattttaaaaatataacgagggataaatttttggtggtgatagtgtcccagtacaaaaaggctgtaagatagtcaaccacagtagtcacctatgtctgtgcctcccttctttattggggacatgtgggctggaacagcagatttcagctacatatatgaacaaatcctttattattattataattatttttttgcgtgaaagtgttacatattctttcacttgtatgtacagagaggtttttctgaatatttattttaagggttaaatcacttttgcttgtgtttattactgcttgaggttgagccttttgagtatttaaaaaatatataccaacagaactactctcccaaggaaaatattgccaccatttgtagaccacgtaaccttcaagtatgtgctacttttttgtccctgtatctaactcaaatcaggaactgtattttttttaatgatttgcttttgaaacttgaagtcttgaaaacagtgtgatgcaattactgctgttctagcccccaaagagttttctgtgcaaaatcttgagaatcaatcaataaagaaagatggaaggaagggagaaattggaatgttttaactgcagccctcagaactttagtaacagcacaacaaattaaaaacaaaaacaactcatgccacagtatgtcgtcttcatgtgtcttgcaatgaactgtttcagtagccaatcctctttcttagtatatgaaaggacagggatttttgttcttgttgttctcgttgttgttttaagtttactggggaaagtgcatttggccaaatgaaatggtagtcaagcctattgcaacaaagttaggaagtttgttgtttgtttattataaacaaaaagcatgtgaaagtgcacttaagatagagtttttattaattacttacttattacctagattttaaatagacaatccaaagtctccccttcgtgttgccatcatcttgttgaatcagccattttatcgaggcacgtgatcagtgttgcaacataatgaaaaagatggctactgtgccttgtgttacttaatcatacagtaagctgacctggaaatgaatgaaactattactcctaagaattacattgtatagccccacagattaaatttaattaattaattcaaaacatgttaaacgttactttcatgtactatggaaaagtacaagtaggtttacattactgatttccagaagtaagtagtttcccctttcctagtcttctgtgtatgtgatgttgttaatttcttttattgcattataaaataaaaggattatgtatttttaactaaggtgagacattgatatatccttttgctacaagctatagctaatgtgctgagcttgtgccttggtgattgattgattgattgactgattgttttaactgattactgtagatcaacctgatgatttgtttgtttgaaattggcaggaaaaatgcagctttcaaatcattggggggagaaaaaggatgtctttcaggattattttaattaatttttttcataattgagacagaactgtttgttatgtaccataatgctaaataaaactgtggcacttttcaccataatttaatttagtggaaaaagaagacaatgctttccatattgtgataaggtaacatggggtttttctgggccagcctttagaacactgttagggtacatacgctaccttgatgaaagggaccttcgtgcaactgtagtcatcttaaaggcttctcatccactgtgcttcttaatgtgtaattaaagtgaggagaaattaaatactctgagggcgttttatataataaattcgtgaaga

SEQ ID NO: 202 - DNA, 2040 bp, Homo sapiens
gggagtaggcagcggcgccgcgtccgctctcgcccgctctcgcccgctcgccagccggctctcctcccgccgcaggacccgcgcgccgcgctcgggggccatgcagcgcctggccatggacctgcggatgttgtcccgggagctctccctctacctggaacaccaagtccgggtggggttcttcggctcgggggtgggcttatcccttatcctgggcttcagcgtcgcttatgccttctactacctgagcagcattgccaagaaaccccagttagtgaccgggggtgagagtttcagccgcttccttcaagaccactgtcccgtggttacagaaacgtactacccgacggtctggtgctgggagggtcgaggacagaccctgcttagacctttcatcacttcgaagcccccggtgcagtacaggaatgaacttattaaaactgcagatggaggacagatttcactggactggtttgataatgataacagtacgtgttatatggatgccagcaccagacctactatcttattgttgcctggcctcacgggaacaagcaaggagtcatatatccttcatatgatccatcttagtgaagaattaggatacagatgtgtggtttttaacaacagaggagtggcgggggagaatctcttgacgccaaggacttattgttgtgctaacactgaagacttggagacagttattcaccatgtacacagcctgtacccttctgctcctttcctggcagcaggggtttcaatgggaggaatgctgcttctaaattacttgggcaaaattgggtccaaaacgcctttgatggcagctgcaactttttccgttggttggaacaccttcgcttgctcagagtcattggaaaaaccactgaactggctactttttaattactatttgacaacctgccttcagtcttcagttaataagcaccgacatatgtttgtaaaacaagttgatatggatcatgtcatgaaggctaaatccatcagagagtttgataagcgattcacttcagtcatgtttggataccaaacaattgatgattattatactgatgccagtccgagtcctagactgaagtcagtaggaattccagtattgtgtctaaattctgtggatgatgttttctcacccagtcatgctattccaatagaaactgctaagcaaaatcctaatgttgctttggtccttacttcttatggaggccatattggttttctggagggaatctggccaagacagtccacttacatggatcgtgtcttcaagcaatttgtgcaagccatggttgagcatggacatgaactctcttaacatgtagttctttgggtgcattttgtctgaaccacaattgtgaaggcagctcagcttagtgcacaaattttaactgttgtatataaagcaaataagccagcagatgggtgaagaggtccagaatgatatgcaaaaactactttttagagaaacaaaacaactttgtagcaacaaattaaatatagtattagattgttacttacgtagattttatttttactatgccttaccaagtacatccttaaacaaagtagtatgtacatgaaattgcacttaaccaaaactattgtgtaaaacaaattttaattcctcagggttttaatttaaactagtatttttttagattatttgttttaggtgatttaatggtactttaataactactaagaaatattggctatttcaatgtaagttataaggtggtacattcctaagggtatttatagttgatgataacatgaaaactgaaataagataaaatacaacgtgctaaatcttttatgtattctaactttaaaagacaagtgcaacaaagttagactgacttctatatgtgctcttttactctgataatattaaattaggactaacttatgttttataatgattataatttacatgcttatttttaaaatagtatatgtggacacatatatatcattatattaaaataaattctaccattttaaattggaaaaaaaaaaaaaaaa

SEQ ID NO: 203 - DNA, 1457 bp, Homo sapiens
actgcaacgcggaggagcaggatggagatccctgtgcctgtgcagccgtcttggctgcgccgcgcctcggccccgttgcccggactttcggcgcccggacgcctctttgaccagcgcttcggcgaggggctgctggaggccgagctggctgcgctctgccccaccacgctcgccccctactacctgcgcgcacccagcgtggcgctgcccgtcgcccaggtgccgacggaccccggccacttttcggtgctgctagacgtgaagcacttctcgccggaggaaattgctgtcaaggtggtgggcgaacacgtggaggtgcacgcgcgccacgaggagcgcccggatgagcacggattcgtcgcgcgcgagttccaccgtcgctaccgcctgccgcctggcgtggatccggctgccgtgacgtccgcgctgtcccccgagggcgtcctgtccatccaggccgcaccagcgtcggcccaggccccaccgccagccgcagccaagtaggagggggctgggccgcgcccgcaccccgggagcctcctcaggctccctctattaaagccgatctgactccgcccagccagatgtcccgagtgcgccaaggactgtcctctcacccactcctggattctgccctgacctccatcctggacactgccttgataacatagacccttccactgacaccctcgctctcacaccccctccagctttccgaccccacaccgacaactcctcggcttccagaccctaccagcactaccctaaccctcagccgacagtctcagccccaccgacccactttcttggcatatagccccacttaagacccctcctctacttccttctgagtcctctacaaagacatccgggtactacatttccatcccttccctattttgacaccaaattatggtgtagacagccctcccccaaccccaggccagtcaggcacaatccccccaccccccaaacgtcctggactgcacagacctcccactccagaccatccaggcctggttcccaagacccgatccttcccctgcaaccagacagtctacaactgccccctccagcccattttctgccgtgaaaccccagccagccacaccagactctggaaccctttttcgactgccccaactcttggacaccaggccaactagaacacccaacaccaaactgtacagactctcccaccccaacctccccagactctgcacggatgtcctaggccccctccccaactctaaccagaccccatccccctaagtccctttgtcttgacccccaagtcttcaaccagatatcctcggcaacccacctcccaccctcctcctcttctccttcaagacccaactgagcacccgctctgattccccacagcctttctccctgccaccactcccttagtctttcccaggcttactctcccaataaatgtgctagagctctgc

SEQ ID NO: 204 - DNA, 3648 bp, Homo sapiens
cccacgcctaaggtccaggtcccagggctttcccttgcaccttcatccctggccctgcagaggcctgcttctcgcttccggggtcgccagagcgcccctcccgccaccccgccatctcttggccggatcgtgcgagagaaggggaggaggtctggggtttccagagtccgcggttttgctaagaagccgcagtgatgttgacgcggctggtcctcagtgcacacctgagtagcacgacctctccgccctggacgcacgctgccatcagctgggagctggacaacgtgctgatgcctagtcccagaatctggccccaggtgactccaacaggcaggtctgcctctgtcaggagtgagggtaacacctcctcactctggaatttctcagctgggcaggatgtgcatgccatagtaaccagaacctgtgagtctgtgctgagctctgccgtctacacccacggctgtggctgtgtgaggtctgccacaaacattacctgtcagtcctcaggacaacaaaggcaggcggcccggcaggaagaggagaactcaatctgcaaggcccatgatagtagagagggccgcctgggctaccccctcagtgcccatcagcctggttccggtggtcctaactagccctgtctccttgccaatagccctgtgctccccagccccctcccccatgcagacggctgctatgacatccctgttccttaaagtgcggggttcctcgctgccttctcctccctaactggcaccctgtgcaaacctgctgcagagaacagtgtcttgggcagtgcgatagtcctccagttcaccaacagtaaaaatggtctcaatggggagagatgtctgactgcaagcgctgagtccttccagaggagggctggagggacaggagggcggatcaggtggcctcctgagctggttcctggcgccgatgtaatggatgctgattaccagcggtgagggcatcgtggaagggactgcagaggtgtgcgagatgagtggaatgaggccccaggtgctgatttttatgcccaggatgctcctggctgtcatgggctcccaggggctccaggcatgcacagctcttccgcctcttctcgaagcagaatgccccagaaagggcacctttactatccagggtggctagagtcgccggtggctgtgcgtgggggctgagggctagaatcagggcaaggggctttcagtgaaacgcagagccaggcagggacagcgcggatctcagaacagtctttgtcagatgggacacttcatccccgcggagctgtccgtgcacacagcgttctctgattgccaagctgttaagcactctgcggaagggagctgctgggaaggcggacgaggcatctcaggtgggtgaggggctccgctgcatcagcgttgctcagacccaccatccctggggagctgtcactgacgcccaggtttccccttctcagtacatcctgtgcctcctttctgggctgcctcagtccctcaaaggggagctccccacatgggtgggattattgttgagaacagtcagggtgttgacgaggatgcaggactgaggttgctcccagagtcactcagtgtccctcgttttgctcggagacatcctgacctgggcaagctctttagggagcatctttcctgtctgtgccgcattctccatggcctttgcactctttttgcttttgttttaaacacgtcatcaattcattgcctgcagcagcttgtactgccttttggtttttctttgcagaacagctctggaagtgaagtgtgtgtgtgtgtgtttgcgtgcactactctggactgggtgccttacacgtgttaacacacttgatcagctcagcaacactgtggaataagtgtaatgtgtccattattcagatcaggagactgagattcagagcagggagggaacttgccagagaccacatggcttgcaagcagcagaacctgggtttgaactgacagcggcctgacttcagaacccacgctttcccaccctcctacttcacacccatttgagtccagccatcttggttctgaatcataaccctgactctcctggccacatcctatgctccacattacatgttactctacaggttaccaccctgggtctctttcctatataagaaatagaaatatttgtggaaatcctaatgttcatgacatctctgccattttatcaggaaaaattctatcctaccaaatactggtataatgtacttggcccccctggattggattggtataggttaagagcagatataaggtctgaaataatcccggtattcctagtatgtggaattattatcatggaatcataatggcagtttgcacctctgttgggctctttcaactcctgtgttggctcaggagaatcctatcacattagtccccttttgtagttggatagttgggcttgccagaaggcacacaaatttgggttaactcatttccaggattctggcattgtagacacagaaacaccgactgtgaagttttatgtaatacaaacactgggagatttagcaataggcctgccaggcggccctggcttctggctgcacaacaaaggggggtggctggtgccaaatggggcaacagaaggtgagtttggggcctgcagagcctcgggtagcccagaggagcgagagagtattggctgttcattttaactccatccttggaggattccccaccacaagcctaaggaagtaataaaacctcatgcattattttttgatatctggagagaaacacgtaccctagaaatgctgtggactaattccatggttactttgtcattaaagaaaccaaaatactgagaggtcaccataaacacaaaaaggcagagagagaaggattaaatggtgtttcatgtaaggatctttaaagggagacagaattctagtctgaaaggagcgcaggcagatctggcattttgcttggggagttcaattctttggagaaaatacagagacaaaaagaccattttgatggtatttaaaatatccctctgcccagtgtatctaagtgagtctaaatatattcagcaattttttaaagggcagatattaggcccgattcaaggtatggaatatagattcgaaagggttagtgataggtgagtgcctttcaggtagctttgcatcacagaccaagcccattattgaggactgtacgtatggagcaggcccgtgagcttgtgactgagtttcccaacctgccaggctcccatttgcttaggatgaatatttttctgccctccctggtgagccactgtgggccactcgccactccttacaccccttccctttaatacctcgcttggcttacttgcaaaatccacatgcatcctcctggatctcacagaagatgtatgaaaagtcatggccatgaaaagggcacggaaatcaaattaattaattttgctttttccccacgtttgtttctgtctgtctggtacttttcctttttaagcctgccatctctttgaaagtgagccgcacagtgataatccattttcttcattgtaaccccacagtgtatgtattccacattaaataataaaagggattaataattaaatcaaaatgaaaaaccaaaaaaaaaaaaaaaaaaaaaaaaa

SEQ ID NO: 205 - DNA, 3675 bp, Homo sapiens
cgaccacccggcctcggccaataagcgccgccctctcgcccccgtgttactgggtagaagaaaacaaaaacaaacagagcgagaagggccagagactctccgaggcggcggcagagacagaagagcggggtcggggccggctgaccaggaacctgggcgagcagcggcgggggcccgagggattctgaaggaagatttccattaggtaatttgtttaatcagtgcaagcgaaattaagggaaaatggatgtagaaaatgagcagatactgaatgtaaaccctgcagggtattttccctaattctccatggtgcttcaatagcatgttattatcataaaaatgaacagttttgtggaatagatgaccaaatatcctgataacttaagtgactctctcttttccggtgatgaagaaaatgctgggactgaggaaataaagaatgaaataaatggaaattggatttcagcatcctccattaacgaagctagaattaatgccaaggcaaaaaggcgactaaggaaaaactcatcccgggactctggcagaggcgattcggtcagcgacagtgggagtgacgcccttagaagtggattaactgtgccaaccagtccaaagggaaggttgctggataggcgatccagatctgggaaaggaaggggactaccaaagaaaggtggtgcaggaggcaaaggtgtctggggtacacctggacaggtgtatgatgtggaggaggtggatgtgaaagatcctaactatgatgatgaccaggagaactgtgtttatgaaactgtagttttgcctttggatgaaagggcatttgagaagactttaacaccaatcatacaggaatattttgagcatggagatactaatgaagttgcggaaatgttaagagatttaaatcttggtgaaatgaaaagtggagtaccagtgttggcagtatccttagcattggaggggaaggctagtcatagagagatgacatctaagcttctttctgacctttgtgggacagtaatgagcacaactgatgtggaaaaatcatttgataaattgttgaaagatctacctgaattagcactggatactcctagagcaccacagttggtgggccagtttattgctagagctgttggagatggaattttatgtaatacctatattgatagttacaaaggaactgtagattgtgtgcaggctagagctgctctggataaggctaccgtgcttctgagtatgtctaaaggtggaaagcgtaaagatagtgtgtggggctctggaggtgggcagcaatctgtcaatcaccttgttaaagagattgatatgctgctgaaagaatatttactctctggagacatatctgaagctgaacattgccttaaggaactggaagtacctcattttcaccatgagcttgtatatgaagctattataatggttttagagtcaactggagaaagtacatttaagatgattttggatttattaaagtccctttggaagtcttctaccattactgtagaccaaatgaaaagaggttatgagagaatttacaatgaaattccggacattaatctggatgtcccacattcatactctgtgctggagcggtttgtagaagaatgttttcaggctggaataatttccaaacaactcagagatctttgtccttcaaggggcagaaagcgttttgtaagcgaaggagatggaggtcgtcttaaaccagagagctactgaatataagaactcttgcagtcttagatgttataaaaatatatatctgaattgtaagagttgttagcacaagttttttttttttttttttttaagcacttgttttgggtacaaggcatttctgacattttataaacctacatttaaggggaatttttaaaggaaatgttttttcttttttttttgtttttcgagggggcaaggagggacagaaaagtaacctcttcttaagtggaatattctaataagctaccttttgtaagtgccatgtttattatctaatcattccaagttttgcattgatgtctgactgccactcctttctttcaaggacagtgttttttgtagtaaaatcactggtttatacaaagctttatttagggggtaaagttaagctgctaaaaccccatgttggctgctgctgttgagatactgtgctttgggagtaaaaaaagaaagttatttctttgtcttaaagaatttttaaaaaattagtcatgagacttattcatctttccagggaacatactgattggtcttaaaagactagacagttaagtaaaaggtggctggaacatctatttttctacaaaactggaaaaatgaacctggttctagaagaatgtacaccaaaataaaacatgtgaagcagtattgattctttattgggagtacatttttttaggtctcttaaactttaatttcacacagtaaattttgaatctcataaggaagcatatttgaacctagtcaatttaatcttagtgttcccttgaaaactttttttccctacaaaattttaagtgaaaaatacaatagtaaattaagattacactggggaaaaaaatgcaggtatcactttactccattgttatctgacctagagcttaattaagttttagaaatatgtaataccttccatcattccatcatccttaaattctgttaccaaataatggctaatgttacaaaaagttatactccagagacccaaagcttgacatttacctaatgtatgagaaaatattaccaattaacaataaagaatgatcatatttttaacctcttttacatagcctaataactcagcaaggcctcaacgtctgtgctaatttaaactgccaaatattgactgcagcaaacaagaattatattcagaatttatgagggtactgttaggagtatactgcttacaggtttagatatagtctgttagaattaaaaccaagtttagtgttcatatttacctcatgggctttatcaagcccatattacctcagcttatatatagttaccatttttaggtttttaattgtttgacacttggatgataaatgcagtcattttattctcaagtgcttaaaattaatgtaattaaaagcttagctgactacagaataggtgagggtttcttaaaaatgagatttaagggctgggcacggtggctcatgcctgtaatcccagcactttgggaggccgaggtgggcggatcacttgaggttgggagttcatgaccagcttgaccaacatgaagaaaccctgtctctattaaaaatacaaaagtagccaggcatggtggcgcatgcgtgtaatcccagctacttgggaggctgaggcaggagaattgcttgaacctgggaggcagaggttgcagtgagtcgagatggtgccattgctctcgtttgggcaacaagagtgaaactcttgtctcaaaaaaaaaaaaaaatgaggtttaagacagttttgtcattactggtgggatctggtcacacaagatagcattaaacgtgacatggcacataaaattggttaaaaaattttgttttttaattacgtaatgtaaaagcccaacaaacactttatgcaagattggaatgtatcttcaaattcagatttaataaacatgtaaagatcctctgtaaaaaaaaaaaaaaaaaaaaa

SEQ ID NO: 206 - DNA, 2404 bp, Homo sapiens
cccaaagtaggctaggcctacggaagctgggtcttcttgctgtgaggtcgcgttccccagtgttacggagggtccttgaggcaggagtgaaaattgggtctgggggttagtcctggggtggaggtctgggcacgccgggtcggaccccctccatcttcggttttgcacaccccgctttccagcgcggagtcgcggcgggtagggcggcgtcgcgtgcgtgacgtcatccagcggcgcctcgcgaggctccagtggccttgacctcccgcggcgtgggaggctgcgcggcgatgctgcagttcgtccgggccggggcgcgggcctggcttcggcctaccggcagccagggcctgagttccctggcggaagaggcagcgcgtgcgaccgagaacccggagcaggtggcgagcgagggtctcccggagcccgtgctgcgcaaagtcgagctcccggtacccactcatcgacgcccagtgcaggcctgggtcgagtccttgcggggcttcgagcaggagcgcgtgggcctggccgacctgcaccccgatgttttcgccaccgcgcccaggctggacatactgcaccaggttgctatgtggcagaagaacttcaagagaattagctatgccaagaccaagacgagagccgaggtgcggggcggtggccggaagccttggccgcagaaaggcactgggcgggcccggcatggcagcatccgctctccgctctggcgaggaggaggtgttgcccatggcccccggggccccacaagttactactacatgctgcccatgaaggtgcgggcgctgggtctcaaagtggcactgaccgtcaagctggcccaggacgacctgcacatcatggactccctagagctgcccaccggagacccacagtacctgacagagctggcgcactaccgccgctggggggactccgtactcctcgtggacttaacacacgaggagatgccacagagcatcgtggaggccacctctaggcttaagaccttcaacttgatcccggctgttggtgagcaaagagcccaggcccctagagtgcgcatgtgcaggctccgctgttagaatcacagcggttcaaatccggcatctggtcgctgagtggcctcaggcagtgaccacgctcccggacccaaccttcagcttgcccaaagcaataatctttcctaaagaagtgcttggctggggatggtggctcacgcttgtaatcccagtactttgggaggccaaggcagtctgggcaatatagtgaggctcccatctgtactaaaaataaaaaagttaggcgtggcgatgtgcacctgtagtcccagctactcgggggctgagccaggcggatagcttgagctcagggggccaaggctgcagtgagtcatgatcgcaccactgcacccaaacctggggagagagctagactcttgtctcaaaaaaaaaaaaaaaaaaaaaaaaaaagctccaaagtcacctctgtcaaagccacagtctgttccttccacagccacaagatggcgacatgagcctaagtcaagtcctgtccctcaacccacgcccctcgctggcttccccacctctctcaggatgaaagcccaagtcatcagggtggcacgtcaggccctgcacgatgtgccccgtcacctccctgccctcccgtcatttgccctgggtctcccccaccagaatgggagccaggagtcccagccaggcacaggaccgagcctggctctcggtcagcaggtgatgagctgggagcagctccttggccagaggcttacaggcaacaagcggccaggcagggtctggccccgggctgctgggctcacaaagtcacactagaccacagtgacgatctctgtaagcacaaagggactccgatgtgggtggggtgaggagagaggcagccccggcctgaccggccccccgccccgcccccaccccgcccccaggcctaaatgtgcacagcatgctcaagcaccagacgctggtcctgacgctgcccaccgtcgccttcctggaggacaagctgctctggcaggactcacgttacagacccctctaccccttcagcctgccctacagcgacttcccccgacccctaccccacgctacccagggcccagcggccaccccgtaccactgttgatgtgaagcacctcttctgagccaggccgagcccctggccgacttgggagcctcaggcccacgcccacccttcgaggaaggtgtcacctggaccccttcattccacggaggaagctgaggccacagggagcggccatcgccattgggaaggggcgactccacggaaagcccagacgggcttctgcatccattccctctttttgtttttaaaataaattgtatttttgaatcaaggaggataaagataa

SEQ ID NO: 207 - DNA, 2815 bp, Homo sapiens
cactgtgtactgagactggatgcatccttgcaataaaaaagaggttgatcacgacaaatgtgaaccccgccgttataaaaacagccatcatggctgtaaatgccaaaaagcagtcagtcttgtaacttgaaaaaaaaaaaaaggaattgtagattgtgcgcatggactcggagtgggggcggtggacagtaagtcatgatgttttggtggtaccacctggttgaatttcttcatctgaataagaagctcctgtgatgttctggggaggccttggaaggctagcgcatccctcatagaaagtgaatgggagctacggacaccgtaccctgggctcagagaagagcctgctggacctggaccttgctgagggccctggccccacctgctgccagggcctgtttctccctgcaggaagcccacagccccgggctcacccccaagcttgtgagaggctgctgcatttcccccaccctaacaggtcacctagaccccaggccacgtatgtgaacggcagcctcccaaccacacaacacatcaaacaggagtccttgcccgactaccaagccatggcagaggcccgcacatccctgtctgcccactgtcggggcccgctggccactggcctgcacccagacctggacctcccgggccgaagcctcgccacccctgcgccttcctgctaccttctgggcagcgaacccagctctggcctgggcctccagcccgagacccacctccccgagggcagcctgaagcggtgctgtgtcttgggcctaccccccacctccccagcctcctcctcaccctgtgcctcctccgacgtcacctccatcatccgctcctcccagacgtctctggtcacctgtgtaaatggactccggagcccccctctggcgggagatctggggggcccttccaagcgggcccggcctggccctgcatcgacggacagccatgagggcagcttgcaacttgaagcctgccggaaggcgagcttcctgaagcaggaacccgcggatgagttttcagagctctttgggcctcaccagcagggcctgccgcccccctatcccctgtctcagttgccgcctggcccaagccttggaggcctggggctgggcctgggaggcagggtggtggccgggcggcaggcgtgccgctgggtggactgctgtgcagcctatgagcagcaggaggagctggtgcggcacatcgagaagagccacaccgaccagcgcaagggcgaggacttcacctgcttctgggctggctgcgtgcgccgctacaagcccttcaacgcccgctacaagctgctcatccacatgcgagtgcactcgggcgagaagcccaacaagtgcatgtttgaaggctgcagcaaggccttctcacggctggagaacctcaagatccacctgaggagccacacgggcgagaagccgtacctgtgccagcacccgggttgccagaaggccttcagcaactccagcgaccgcgccaagcaccagcgcacccacctagacacgaagccgtacgcctgtcagatccctggctgctccaagcgctacacagaccccagctccctccgcaagcacgtcaaggcccattcagccaaagagcagcaggtgcgtaagaagctgcatgcgggccctgacaccgaggccgacgtcctgaccgagtgtctggtcctgcagcagctccacacgtccacacagctggctgccagcgacggcaagggtggctgtggcctgggccaggagctgctcccaggtgtgtatcctggctccatcaccccccataacggacttgcatcgggcctcctgcccccagcgcacgacgtaccttccaggcaccacccgctggatgccaccaccagttcccaccaccatctgtcccctctgcccatggctgagagcacccgggatgggttggggcccggcctcctctcaccaatagtcagccccctgaaggggctggggccaccgccgctgcccccatcctctcagagccattctccggggggccagcccttccccacactccccagcaagccgtcctacccacccttccagagccctccacccccgcctctgcccagcccacaaggttaccagggcagtttccactccatccagagttgcttcccctatggcgactgctaccggatggctgaaccagcagccggtggggacggactggtcggggagacccacggtttcaaccccctgcggcccaatggctaccacagcctcagcacgcccttgcctgccacaggctatgaggccctggctgaggcctcatgccccacagcgctgccacagcagccatctgaagatgtggtgtccagcggccccgaggactgtggcttcttccccaatggagcctttgaccactgcctgggccacatcccctccatctacacagacacctgaaggagcccccacatgcgcctgcccgtccagcactgcagatgccacctcgcccacctgctgtcgctcccaccctccgtgcacctagcaggagtgccaggccacagccggaacagccaggccatgacccaggggagccagcgctgccaccccacccagcgctgccagggagccgccatccgagcttgagctgggcgcacagaggtgcccgccaggatctgtggccctgtaacattccctcgatcttgtcttcccgttcctccccgcagtggttttgaaatcacagacctcgtgtatataaaatatgcagaacttgttttccgttcccctgccagttttatatttttggttttacaagaaaaaacattaaaaactggaaaggagatgtg

SEQ ID NO: 208 - DNA, 6773 bp, Homo sapiens
gatgcaggccatggacccggccgcagcggatctttacgaggaggacggcaaagacctggacttctacgacttcgagccgctgcccaccctccccgaggacgaggagaacgtgtctctggctgacatcctctccctgcgggaccgcggcctcagcgagcaggaagcctgggccgtgtgcctggagtgcagcctgtccatgcggagcgtggcccacgccgccatcttccagagcctgtgcatcacgcccgacaccctggccttcaacaccagcgggaacgtgtgtttcatggagcagctcagcgacgaccctgagggtgccttcgttccccccgagttcgacgtgaccgggaacacctttgaggcgcacatctactctctgggggccacgctgaaggccgccctcgagtacgtggcagagcccacactggaacccaggctgagccaagacctcgaggcgctgctgagccggatgcaggcggaggaccccggggaccggccggaccttgagagcatcatcgcgctgtgtgaagagaagctgcagctcacatcctcctgtcgcgtgtgccggagcctctctgctgtggggaggagggtcctctccatcgagtccttcggagcgctgcaggatgtcagcgagagcagctggcgggagagacctgccccaggaaacgctgggcccaggaggccgcccggggaccccagcactgacccggaggttctgccgacccccgaaggcccggagtctgagaccagccggggccccagagcctccccaaccaaggctctgctgtccaccccggtgagaaatggcgagagccacagccgggaggggctggccggcctcgtcctggatgccgagcgcaccctcggggagctggacagagacgccctcaggagaagccgcctgcggaaggtgcagacgttccctaggctgctgtccgacagccccgaggccaccctctgcctgccgctgacccgcgggaaaagccagctgcccatatcggaattattctctccggaccccaggaaggcctttctggacaggaaaaatggcctttctagcttccaggctcagcccaaatgcaggctgtggccggagcaggagccggaacaccagctgggacgggttccctgtgcaggccgcagcacggacaggggccctggggtgcccggcagtccaggacagcccgagacttcacaccccagccaggggccagcagaggcccctgcagaccctcgagatgctagcggtgaagcccagactcccagggacgatgagagaattccagaaggagctaggcagctggaaagtgcagccgcggagcagtgggtgtccctgcaggacctcctgtcccagctgggccggcccttccgggagtacgagctgtgggccctgtgcctggcctgcctccgcgcactgcagacacgccctgagcacccagcctacctgtgtctggactccgtgctggttgctgaggacggggctgtgctcttccagccaccccctgccaacggttcctatgactcgttctttctggctcccgagctggcagaggagaggctggtaactgaaaaggcctctgtgtactgtgtggccgccgttctgtggaccgcagccaagttcagcgtcccccgcaaccacaagctggccctgccacgcaggctcaagaccctcctcctggacatggccaggcgcagtgccccggagcggccgtccgcggctgaggccatcaaggtgtgcggcagctacctcctccagcgaggcatggacagccggaaaatccttgcccacctcagagcttccatctgccaggtgtaccaggaggaagagaccatcagcctccaaaacgccttctcagtggttgaactgaagcccagtgtggcaccagccccagagcccagcccaggcttcctgccggtgaacagcgacaccgggcttgtggctgtgccagggcccgtgcccggccagcacccctgcggtgaagaagccacccagctgcctgcagcgttcacctccgaggccacgcacttcaagcccattgtcctcgcgcagaacgcaagtgtggccagggaccagcctgccttggcccaggaggagtccgaggagaggggcggccagagggagggagaaggtgaggagaagctctccctggaggcccacgctgggtcccccagcctgaagacgcctgacgggccggtgcctggtccggggccacagggagcagccccagagcctcttggggcgtcagtgcagcgtgactcagcccagggccgcccctgccctccaccccaggccccagcaaaccagccagagggggcctcatcggcagctcccggctctccagtccccgccccgcccacgaaggcatctgcgctgcccgtagagcaagggccggctgagccgatcccacctggagttgcttccgggggcctcaggcccgacgccctggggcccaccacggcccaccacggcccacgccacccgcccaagcccccacgaagcaaggccaccgagcgcccgggccaggagccagagggccccggggccacccctgccggggaacgtgatgaccagagtccagacagtgtcccagagaggccgcggcccgcagaccggaggctctgtctgccctgcgtggatgcctcgccactcccagggaggacggcctgcccgtcgctgcaggaggccacgcgcctcatccaggaggaatttgccttcgatggctacctggacaatgggctggaggctctgatcatgggggagtacatcttcgccttgaaagatctcacctttgccactttctgtggcgccatttccgagaagttctgtgacctgtactgggatgagaagttgctgcagaacctctttaaggtggtcaacgggcaggcgtcaccctccccaagcacggccgaggaggctgggtcacagctcgagggcagccaaagcccccgctccccgtccagcaagaggccgtcgctgcaccgcctgggaaaagagaagccagccatggccaggaccagcagcagggccccctgctcacccacctcggtgtcggatgtggactcggacgcactgtcacggggaaacttcgaggtggggtttcggcctcagaggtccgtaaaagccgagagagcgcagcagcctgaggctggcgaggacagacggccagctggcggggcctcagacgtggaggcagtgacccgactggccaggtccaaaggggtcggcccagccttgtcccccggcccagccggattccagagctgcagccccggctggtgcagcgccttctacgaggccgactgcttcggggccgacgtccacaactacgtgaaggacctggggcggcagcaggcggacggggccctgcccgacgcccagagcccggagctggaacagcagctcatgatggagaaaagaaactaccgcaagaccctgaagttctaccagaaactcttacagaaggaaaagaggaacaaaggttccgacgtcaagaccatgctgtccaagctgaaagggcagctagaagaaatgaaatccagggtgcaattcctcagcttggtcaagaagtatctgcaggtcatgtacgcggaacgctggggcctggagccctgcaccctcccagtgatcgtgaacatcgcggccgcaccctgcgacacgctggacttcagccccctggacgagtcctcctcgctcatcttctacaacgtcaacaagcacccgggcggccggcagaaggcccgcatcctgcaggccggcacgccgctggggctcatgacctacctgtactccagtgatgccttcctggagggttatgtgcagcaattcctctacaccttccgctacttctgcacaccccacgacttcctgcacttcctcctcgaccgcatcaacagcacgctgaccagggcccaccaggaccccacctcgaccttcaccaagatctacaggcggagcctctgcgtcctgcaggcctgggtggaggactgctacgctgtggacttccctcggaacagcgggctgctggggaagctagaggacttcatctcctccaagatcctacccctggacggctctgccaagcacctgctgggcctcctggaggtgggcatggaccggcgggccgagggcaaccctcgcggcacagacctggagaaccccagggaggccgaggaggatgccagacccttcaacgccctctgtaagaggctctcagaggacggcatctccaggaagagcttcccctggaggctgccccgaggcaacgggctggtgctgccgccacacaaggagcgcccctacaccattgctgccgccctgcccaagccctgcttcctcgaggacttctacggcccctgcgccaagaccagtgagaaggggccctacttcctgacggagtacagcactcaccagctcttcagccagctcacgctgctacagcaggagttgtttcaaaagtgccacccggtccacttcctgaactcacgggccctgggcgtcatggacaagagcactgccatccccaaagccagctcttctgagtctctttcggccaaaacctgcagcttatttctgcccaattacgttcaggacaagtatctgttacagcttctaagaaacgcagatgacgtcagcacctgggtggctgcagagattgtgaccagccacacctccaagctgcaggtgaacttgctgtccaaatttttgctgattgcaaaatcttgctatgagcagagaaacttcgcgacagccatgcagatcctgagcgggctggagcacctggccgtgaggcagtcccctgcctggagaattctgcctgcaaagatagcagaggtcatggaggagctgaaagccgtggaggtcttcctgaagagcgacagcctgtgtctgatggaagggcggcgcttccgggcgcagcccaccctgccctcggcccacctcctggccatgcacatccagcagctggagacaggcggcttcaccatgaccaacggggcccacaggtggagcaagctcaggaacatcgcaaaggtggtgagccaggtgcacgcgttccaggagaacccttacaccttcagccccgaccccaagctccagtcgtacctcaagcagaggattgcccgcttcagcggtgccgacatttccacactcgccgcagatagcagggccaacttccaccaggtctccagcgagaagcactcacggaagattcaggacaagctacggaggatgaaggctacattccagtagccgagctcgggcctggtgtggaattccagatccgaatccgactgtggggggcgggctgggaggtgggagccgcgtctcaggcccggccgttatcaaggcccctccgcccccgaaccctggggagctggaccaggaggtggaggctcaggggaccccatggggacaggcagagctggtctcctcccagcagacggagccaggacgggcacaagagtcttggaggtttgcgtgtttctgctagaattaaaaagttaaatttaaaaatgaaaatgaaagacagcttcccaggagttttgtgcctgtctgcgcctctcacacacagataagtggctcttacccagctctcagtgactcccccacaaaacagcaacagcctccaccgccaactcaacaaacttcagagtagctcctccctgagcaggtttctgagccagcctcggttggctgagcaacgaagggccaaagctgacctctgagtggccaactgcagctcccagggactccgagacctccggtccgagaccctgcctgggttcaccccccacaacccagacccagaaccgctctccccttccctgcccagtgcccctcttccccagcccagacccccaggtgcccaaggcctgctgctggagcaggcaccttgggctgggcctgctcccccagggcccagggccccccagcttagaacagcccttggtgaggtggtcatgcccgggcaaaggccctgcttcctggaaaggacactcagagcagctccaagacagaggctctgtggcgggggtccctgagagtgcccccacccatctcatgccccagggaccgccactgcccaccgcctccagcagccatgcatgtgcgcccgcagccctgcctccacagctcgccacacactcacgcttcgccagagacaggaagtgcgctgcctccacggccccttgcccttgctcaggttcttggaccccaggcagctggtgtggagccccttggccagggccatgggagtcccgcgcagtcagctccacattggcctctgcagctgggtgaccagagccccgggcacggccccagctccgtggggctctcacggtgccaatcacaagacccagggttgtgcttttgagttttagaattagtcattctttagagcagccagctagtggcatttctaggaaaactgtgacctgtgacaaatcgctgcatttttaatgtcaagatgtgttttcccacataaattcaccggagacatccgggccccgcttcgatgtaacatgagaggaagtcggcgtcctggccacgaaatgcagttcacttttttttaggcttttatatggattatgttttgctgacccacgcccgcattttcagattttgtatctaacagacagtgctcagtgcaaatcaacattccagcggtcaggactgaccccggggcagcactgggctcaggcttcagcgcgactgtccgcatggctccctcccgtcctggcaccaatttctgaataaagtcctttctaccagc

SEQ ID NO: 209 - DNA, 3178 bp, Homo sapiens
ggggctcgacggtggccgacgtgggacagtctggctgtggcaggggtctcggaaaccatgggttattgcagtggcaggtgcacgcttatctttatctgtggcatgcaactggtactgaagatggatggggatcattaggtttctcttattatattgtcccacaaatatcttaaccgtttgtgtgctggagaggcaaatatttgacttccttggatatcagtgggcacctatcctggcaaattttgtacatattattatcgtcattcttggtttgtttggaactattcaatatagacctcgttacataacaggatatgctgtctggctagtcctctgggttacgtggaatgtgtttgttatctgcttctatttggaggctggggacctctcaaaggaaacagaccttatcctgacttttaatatatcaatgcaccgatcttggtggatggagaatggaccaggatgtacggtgacgtcagtgacacctgccccagactgggccccagaagaccatcgctacatcacggtctcagggtgtttgctggagtaccagtacatagaagtggctcatagttccctccagattgtcctcgcactggcaggtttcatctacgcctgttatgttgtgaaatgtataactgaagaagaggacagctttgatttcataggtggctttgactcttatggctatcaagggcctcagaagacatctcatttacaactacagcctatgtacatgtcaaaataatacagatgacttcagtatgtcagcccatggacctttcaaagaacttttttcgcagtggcctcctgcatttcatgaagagcaagaagcaactgagtttaaatacatacacgtattaacaaaacaaatgcaaagcctctacatacaacactgacacacacacacacacacacgtgagcacgcacacaccaattccacttgacctcctctttctaactgaaacagacaaatatgcaggacacgcccatcttggatttcctgaaagcaggcccctttctcccaggccttcggaaagttcagaaggagatgtgttgatgcccaacggttgccggccattgctaactcctctgcagcccagcgggttggcctctgtgagctgggaagtcatccaaggcacattagtttgagagctctgtcttctgcactccatacatcttgacagcaccacggctacttaggcaatgtaattgcaaaaacaaacgaaacatgccatgatgaccttgtacccgaagtccgaaatggcagattgtttgccctaaaggctgtaccgtacatacttgccttaacccacctacattgtgtgcccaagaatcccagtgcagacagccccaagccacttcctttaggctaacacactgctattaattctaaatgagttcaagcctgtgtgtttcatgtcaaggaacaagactgaatagctcagcagctccagtgtgtctgtataagaaaagtgccagctgtcagcaaagtgctttaccatagagcctccatggtggcccaaaagagacaagtaacaataacaatatctgtcatctttataattctaaaatatggtcttctgatggggttgggggtgggacagagtaaaacattaatctactaaactcactaatctactggaagcagaaagcagaaatggcttaactcgctgattttatttattgcactctaggtgcttttataagtatctacaattgtcttttactaacacagaaacagctgtggatttctatcaacagaggccaactgaatatgtattagctatgtttactcttttatatctaattcaaattgaagactctacgtaggtgaacttttttttctaacttcagtgtacaagattatttttgggtgggtggggggagcaatagttaccttggtgaaatatttgagatctttttgtggtatttgggggatctgttgtgtgttagagtgtatttcaaccctcctgtattattgtggcagaaaaactgtgctgttaacgtagttggcaacaagatgcctttggaaacttaatagtaggtcaatgtgtttatggaatattctgaactcctaggaaattttgttctatattttaaagcattatttggttttcattagtggaaaacataattagctcaggcttatcaggaactcagatgagtcatattttttcttggatacacctgagacattaaactcaattttttaaaactaacacaccattctttagtgcagtgaaattcaaaagttataaattggcatggagcaagttttttctttgatttctatgaagtttcagttattggattaaactactttagaccttagcccattcggatctacatacaccagttccattactgtgtttgcatggatgtctgtaatatacacacacatatacatttgaaaatgatagaggaacaaagagttatcattggaacataaactataaaaaaagattccagcactcatgcttgaatttcctcagtgggttgtatgtttgtccatacatacatgtataaaataaacaattgcaaacatgtcagtgaaacctcatatgacgcttttatagtgacatgcatgtttaatgtatgagaaaaatatttaccaatgtattgtcctttgagtcctaaaatataaatactatacatgccagaaactattctaatgtgacttttaatgtgactattaaaaatgaggtttcactgtacattcatgctgtgatgcgatttcaccttatagtacatgtatatgggtacagaaaataaaccctcatattcctgctttaagttacagccaagttttcaccaaatcacaactatcatcaccaccaaaattttaaaaaacagtagttgactactaaaaagtaatcagtggacaggtcatttatgggatcagtaagcacagtagtgtgattatatctgggaaaacatctacagttgtacagctgtatcctcctcaaaatccggtgaagaatgctatttttctaggctgagcttttgttataaacttaatattcagaaggcaagggttatgatcctgatgtgtcctttttttttgcatttgttaattctgaatgtatttttaacagaatgatttttttgacttactagtgtaatttgcattttaaaaataaatggaaaaatacttaaaagaaaaaaaaaaaaaaaa

SEQ ID NO: 210 - DNA, 1968 bp, Homo sapiens
ggcgccctgacaacgcgggcgggctgggctgcgccgcctgctccccgcccctcggccgcctgcaccgggcggggcccgggccagagcgccgccgccgccgctgctgcagcagcagctgctctgcagagtggtggccggggccagggccggggtgccctccctcccaccttctcccgccatgagccagggaagtccgggggactgggcccccctagatcccacccccggacccccagcatcccccaaccccttcgtgcatgagttacatctctctcgcctccagagggttaagttctgcctcctgggggcattgctggcccccatccgagtgcttctggcctttatcgtcctctttctcctctggccctttgcctggcttcaagtggccggtcttagtgaggagcagcttcaggagccaattacaggatggaggaagactgtgtgccacaacggggtgctaggcctgagccgcctgctgtttttcctgctgggcttcctccggattcgcgttcgtggccagcgagcctctcgccttcaagcccctgtccttgttgctgccccacactccactttctttgaccccattgttctgctgccctgtgacctgcccaaagttgtgtcccgagctgagaacctttccgttcctgtcattggagcccttcttcgattcaaccaagccatcctggtatcccggcatgacccggcttctcgacgcagagtggtggaggaggtccgaaggcgggccacctcaggaggcaagtggccgcagtgctattctttcctgagggcacctgttccaacaagaaggctttgcttaagttcaaaccaggagccttcatcgcaggggtgcctgtgcagcctgtcctcatccgctaccccaacagtctggacaccaccagctgggcatggaggggtcctggagtactcaaagtcctctggctcacagcctctcagccctgcagcattgtggatgtggagttccttcctgtgtatcaccccagccctgaggagagcagggaccccaccctctatgccaacaatgttcagagggtcatggcacaggctctgggcattccagccaccgaatgtgagtttgtagggagcttacctgtgattgtggtgggccggctgaaggtggcgttggaaccacagctctgggaactgggaaaagtgcttcggaaggctgggctgtccgctggctatgtggacgctggggcagagccaggccggagtcgaatgatcagccaggaagagtttgccaggcagctacagctctctgatcctcagacggtggctggtgcctttggctacttccagcaggataccaagggtttggtggacttccgagatgtggcccttgcactagcagctctggatgggggcaggagcctggaagagctaactcgtctggcctttgagctctttgctgaagagcaagcagagggtcccaaccgcctgctgtacaaagacggcttcagcaccatcctgcacctgctgctgggttcaccccaccctgctgccacagctttgcatgctgagctgtgccaggcaggatccagccaaggcctctccctctgtcagttccagaacttctccctccatgacccactctatgggaaactcttcagcacctacctgcgccccccacacacctctcgaggcacctcccagacaccaaatgcctcatccccaggcaaccccactgctctggccaatgggactgtgcaagcacccaagcagaagggagactgagtgcctcagcctctcaccccctcctcctcagggcagcgctaggggcctcccctatgcctcagccccatctctgctcctgtttgaattttgttattgttgtttggttgttgtttttttaagttgattttaattttttgtttggttgatttttttgtaaaaaactattttatatataaatataaatctatatctatatctattaaaaaaaaaaaaaaa

SEQ ID NO: 211 - protein, 2844 aa, Homo sapiens
PMAAASYDQLLKQVEALKMENSNLRQELEDNSNHLTKLETEASNMKEVLKQLQGSIEDEAMASSGQIDLLERLKELNLDSSNFPGVKLRSKMSLRSYGSREGSVSSRSGECSPVPMGSFPRRGFVNGSRESTGYLEELEKERSLLLADLDKEEKEKDWYYAQLQNLTKRIDSLPLTENFSLQTDMTRRQLEYEARQIRVAMEEQLGTCQDMEKRAQRRIARIQQIEKDILRIRQLLQSQATEAERSSQNKHETGSHDAERQNEGQGVGEINMATSGNGQGSTTRMDHETASVLSSSSTHSAPRRLTSHLGTKVEMVYSLLSMLGTHDKDDMSRTLLAMSSSQDSCISMRQSGCLPLLIQLLHGNDKDSVLLGNSRGSKEARARASAALHNIIHSQPDDKRGRREIRVLHLLEQIRAYCETCWEWQEAHEPGMDQDKNPMPAPVEHQICPAVCVLMKLSFDEEHRHAMNELGGLQAIAELLQVDCEMYGLTNDHYSITLRRYAGMALTNLTFGDVANKATLCSMKGCMRALVAQLKSESEDLQQVIASVLRNLSWRADVNSKKTLREVGSVKALMECALEVKKESTLKSVLSALWNLSAHCTENKADICAVDGALAFLVGTLTYRSQTNTLAIIESGGGILRNVSSLIATNEDHRQILRENNCLQTLLQHLKSHSLTIVSNACGTLWNLSARNPKDQEALWDMGAVSMLKNLIHSKHKMIAMGSAAALRNLMANRPAKYKDANIMSPGSSLPSLHVRKQKALEAELDAQHLSETFDNIDNLSPKASHRSKQRHKQSLYGDYVFDTNRHDDNRSDNFNTGNMTVLSPYLNTTVLPSSSSSRGSLDSSRSEKDRSLERERGIGLGNYHPATENPGTSSKRGLQISTTAAQIAKVMEEVSAIHTSQEDRSSGSTTELHCVTDERNALRRSSAAHTHSNTYNFTKSENSNRTCSMPYAKLEYKRSSNDSLNSVSSSDGYGKRGQMKPSIESYSEDDESKFCSYGQYPADLAHKIHSANHMDDNDGELDTPINYSLKYSDEQLNSGRQSPSQNERWARPKHIIEDEIKQSEQRQSRNQSTTYPVYTESTDDKHLKFQPHFGQQECVSPYRSRGANGSETNRVGSNHGINQNVSQSLCQEDDYEDDKPTNYSERYSEEEQHEEEERPTNYSIKYNEEKRHVDQPIDYSLKYATDIPSSQKQSFSFSKSSSGQSSKTEHMSSSSENTSTPSSNAKRQNQLHPSSAQSRSGQPQKAATCKVSSINQETIQTYCVEDTPICFSRCSSLSSLSSAEDEIGCNQTTQEADSANTLQIAEIKEKIGTRSAEDPVSEVPAVSQHPRTKSSRLQGSSLSSESARHKAVEFSSGAKSPSKSGAQTPKSPPEHYVQETPLMFSRCTSVSSLDSFESRSIASSVQSEPCSGMVSGIISPSDLPDSPGQTMPPSRSKTPPPPPQTAQTKREVPKNKAPTAEKRESGPKQAAVNAAVQRVQVLPDADTLLHFATESTPDGFSCSSSLSALSLDEPFIQKDVELRIMPPVQENDNGNETESEQPKESNENQEKEAEKTIDSEKDLLDDSDDDDIEILEECIISAMPTKSSRKAKKPAQTASKLPPPVARKPSQLPVYKLLPSQNRLQPQKHVSFTPGDDMPRVYCVEGTPINFSTATSLSDLTIESPPNELAAGEGVRGGAQSGEFEKRDTIPTEGRSTDEAQGGKTSSVTIPELDDNKAEEGDILAECINSAMPKGKSHKPFRVKKIMDQVQQASASSSAPNKNQLDGKKKKPTSPVKPIPQNTEYRTRVRKNADSKNNLNAERVFSDNKDSKKQNLKNNSKVFNDKLPNNEDRVRGSFAFDSPHHYTPIEGTPYCFSRNDSLSSLDFDDDDVDLSREKAELRKAKENKESEAKVTSHTELTSNQQSANKTQAIAKQPINRGQPKPILQKQSTFPQSSKDIPDRGAATDEKLQNFAIENTPVCFSHNSSLSSLSDIDQENNNKENEPIKETEPPDSQGEPSKPQASGYAPKSFHVEDTPVCFSRNSSLSSLSIDSEDDLLQECISSAMPKKKKPSRLKGDNEKHSPRNMGGILGEDLTLDLKDIQRPDSEHGLSPDSENFDWKAIQEGANSIVSSLHQAAAAACLSRQASSDSDSILSLKSGISLGSPFHLTPDQEEKPFTSNKGPRILKPGEKSTLETKKIESESKGIKGGKKVYKSLITGKVRSNSEISGQMKQPLQANMPSISRGRTMIHIPGVRNSSSSTSPVSKKGPPLKTPASKSPSEGQTATTSPRGAKPSVKSELSPVARQTSQIGGSSKAPSRSGSRDSTPSRPAQQPLSRPIQSPGRNSISPGRNGISPPNKLSQLPRTSSPSTASTKSSGSGKMSYTSPGRQMSQQNLTKQTGLSKNASSIPRSESASKGLNQMNNGNGANKKVELSRMSSTKSSGSESDRSERPVLVRQSTFIKEAPSPTLRRKLEESASFESLSPSSRPASPTRSQAQTPVLSPSLPDMSLSTHSSVQAGGWRKLPPNLSPTIEYNDGRPAKRHDIARSHSESPSRLPINRSGTWKREHSKHSSSLPRVSTWRRTGSSSSILSASSESSEKAKSEDEKHVNSISGTKQSKENQVSAKGTWRKIKENEFSPTNSTSQTVSSGATNGAESKTLIYQMAPAVSKTEDVWVRIEDCPINNPRSGRSPTGNTPPVIDSVSEKANPNIKDSKDNQAKQNVGNGSVPMRTVGLENRLNSFIQVDAPDQKGTEIKPGQNNPVPVSETNESSIVERTPFSSSSSSKHSSPSGTVAARVTPFNYNPSPRKSSADSTSARPSQIPTPVNNNTKKRDSKTDSTESSGTQSPKRHSGSYLVTSV

SEQ ID NO: 212 - protein, 443 aa, Homo sapiens
PMQPPPSLCGRALVALVLACGLSRIWGEERGFPPDRATPLLQTAEIMTPPTKTLWPKGSNASLARSLAPAEVPKGDRTAGSPPRTISPPPCQGPIEIKETFKYINTVVSCLVFVLGIIGNSTLLRIIYKNKCMRNGPNILIASLALGDLLHIVIDIPINVYKLLAEDWPFGAEMCKLVPFIQKASVGITVLSLCALSIDRYRAVASWSRIKGIGVPKWTAVEIVLIWVVSVVLAVPEAIGFDIITMDYKGSYLRICLLHPVQKTAFMQFYKTAKDWWLFSFYFCLPLAITAFFYTLMTCEMLRKKSGMQIALNDHLKQRREVAKTVFCLVLVFALCWLPLHLSRILKLTLYNQNDPNRCELLSFLLVLDYIGINMASLNSCINPIALYLVSKRFKNCFKSCLCCWCQSFEEKQSLEEKQSCLKFKANDHGYDNFRSSNKYSSS

SEQ ID NO: 213 - protein, 783 aa, Homo sapiens
PMGKRDRADRDKKKSRKRHYEDEEDDEEDAPGNDPQEAVPSAAGKQVDESGTKVDEYGAKDYRLQMPLKDDHTSRPLWVAPDGHIFLEAFSPVYKYAQDFLVAIAEPVCRPTHVHEYKLTAYSLYAAVSVGLQTSDITEYLRKLSKTGVPDGIMQFIKLCTVSYGKVKLVLKHNRYFVESCHPDVIQHLLQDPVIRECRLRNSEGEATELITETFTSKSAISKTAESSGGPSTSRVTDPQGKSDIPMDLFDFYEQMDKDEEEEEETQTVSFEVKQEMIEELQKRCIHLEYPLLAEYDFRNDSVNPDINIDLKPTAVLRPYQEKSLRKMFGNGRARSGVIVLPCGAGKSLVGVTAACTVRKRCLVLGNSAVSVEQWKAQFKMWSTIDDSQICRFTSDAKDKPIGCSVAISTYSMLGHTTKRSWEAERVMEWLKTQEWGLMILDEVHTIPAKMFRRVLTIVQAHCKLGLTATLVREDDKIVDLNFLIGPKLYEANWMELQNNGYIAKVQCAEVWCPMSPEFYREYVAIKTKKRILLYTMNPNKFRACQFLIKFHERRNDKIIVFADNVFALKEYAIRLNKPYIYGPTSQGERMQILQNFKHNPKINTIFISKVGDTSFDLPEANVLIQISSHGGSRRQEAQRLGRVLRAKKGMVAEEYNAFFYSLVSQDTQEMAYSTKRQRFLVDQGYSFKVITKLAGMEEEDLAFSTKEEQQQLLQKVLAATDLDAEEEVVAGEFGSRSSQASRRFGTMSSMSGADDTVYMEYHSSRSKAPSKHVHPLFKRFRK

SEQ ID NO: 214 - protein, 1021 aa, Homo sapiens
PMQSCARAWGLRLGRGVGGGRRLAGGSGPCWAPRSRDSSSGGGDSAAAGASRLLERLLPRHDDFARRHIGPGDKDQREMLQTLGLASIDELIEKTVPANIRLKRPLKMEDPVCENEILATLHAISSKNQIWRSYIGMGYYNCSVPQTILRNLLENSGWITQYTPYQPEVSQGRLESLLNYQTMVCDITGLDMANASLLDEGTAAAEALQLCYRHNKRRKFLVDPRCHPQTIAVVQTRAKYTGVLTELKLPCEMDFSGKDVSGVLFQYPDTEGKVEDFTELVERAHQSGSLACCATDLLALCILRPPGEFGVDIALGSSQRFGVPLGYGGPHAAFFAVRESLVRMMPGRMVGVTRDATGKEVYRLALQTREQHIRRDKATSNICTAQALLANMAAMFRIYHGSHGLEHIARRVHNATLILSEGLKRAGHQLQHDLFFDTLKIHCGCSVKEVLGRAAQRQINFRLFEDGTLGISLDETVNEKDLDDLLWIFGCESSAELVAESMGEECRGIPGSVFKRTSPFLTHQVFNSYHSETNIVRYMKKLENKDISLVHSMIPLGSCTMKLNSSSELAPITWKEFANIHPFVPLDQAQGYQQLFRELEKDLCELTGYDQVCFQPNSGAQGEYAGLATIRAYLNQKGEGHRTVCLIPKSAHGTNPASAHMAGMKIQPVEVDKYGNIDAVHLKAMVDKHKENLAAIMITYPSTNGVFEENISDVCDLIHQHGGQVYLDGANMNAQVGICRPGDFGSDVSHLNLHKTFCIPHGGGGPGMGPIGVKKHLAPFLPNHPVISLKRNEDACPVGTVSAAPWGSSSILPISWAYIKMMGGKGLKQATETAILNANYMAKRLETHYRILFRGARGYVGHEFILDTRPFKKSANIEAVDVAKRLQDYGFHAPTMSWPVAGTLMVEPTESEDKAELDRFCDAMISIRQEIADIEEGRIDPRVNPLKMSPHSLTCVTSSHWDRPYSREVAAFPLPFMKPENKFWPTIARIDDIYGDQHLVCTCPPMEVYESPFSEQKRASS

SEQ ID NO: 215 - protein, 764 aa, Homo sapiens
PMVACRAIGILSRFSAFRILRSRGYICRNFTGSSALLTRTHINYGVKGDVAVVRINSPNSKVNTLSKELHSEFSEVMNEIWASDQIRSAVLISSKPGCFIAGADINMLAACKTLQEVTQLSQEAQRIVEKLEKSTKPIVAAINGSCLGGGLEVAISCQYRIATKDRKTVLGTPEVLLGALPGAGGTQRLPKMVGVPAALDMMLTGRSIRADRAKKMGLVDQLVEPLGPGLKPPEERTIEYLEEVAITFAKGLADKKISPKRDKGLVEKLTAYAMTIPFVRQQVYKKVEEKVRKQTKGLYPAPLKIIDVVKTGIEQGSDAGYLCESQKFGELVMTKESKALMGLYHGQVLCKKNKFGAPQKDVKHLAILGAGLMGAGIAQVSVDKGLKTILKDATLTALDRGQQQVFKGLNDKVKKKALTSFERDSIFSNLTGQLDYQGFEKADMVIEAVFEDLSLKHRVLKEVEAVIPDHCIFASNTSALPISEIAAVSKRPEKVIGMHYFSPVDKMQLLEIITTEKTSKDTSASAVAVGLKQGKVIIVVKDGPGFYTTRCLAPMMSEVIRILQEGVDPKKLDSLTTSFGFPVGAATLVDEVGVDVAKHVAEDLGKVFGERFGGGNPELLTQMVSKGFLGRKSGKGFYIYQEGVKRKDLNSDMDSILASLKLPPKSEVSSDEDIQFRLVTRFVNEAVMCLQEGILATPAEGDIGAVFGLGFPPCLGGPFRFVDLYGAQKIVDRLKKYEAAYGKQFTPCQLLADHANSPNKKFYQ

SEQ ID NO: 216 - protein, 1391 aa, Homo sapiens
PMKAPAVLAPGILVLLFTLVQRSNGECKEALAKSEMNVNMKYQLPNFTAETPIQNVILHEHHIFLGATNYIYVLNEEDLQKVAEYKTGPVLEHPDCFPCQDCSSKANLSGGVWKDNINMALVVDTYYDDQLISCGSVNRGTCQRHVFPHNHTADIQSEVHCIFSPQIEEPSQCPDCVVSALGAKVLSSVKDRFINFFVGNTINSSYFPDHPLHSISVRRLKETKDGFMFLTDQSYIDVLPEFRDSYPIKYVHAFESNNFIYFLTVQRETLDAQTFHTRIIRFCSINSGLHSYMEMPLECILTEKRKKRSTKKEVFNILQAAYVSKPGAQLARQIGASLNDDILFGVFAQSKPDSAEPMDRSAMCAFPIKYVNDFFNKIVNKNNVRCLQHFYGPNHEHCFNRTLLRNSSGCEARRDEYRTEFTTALQRVDLFMGQFSEVLLTSISTFIKGDLTIANLGTSEGRFMQVVVSRSGPSTPHVNFLLDSHPVSPEVIVEHTLNQNGYTLVITGKKITKIPLNGLGCRHFQSCSQCLSAPPFVQCGWCHDKCVRSEECLSGTWTQQICLPAIYKVFPNSAPLEGGTRLTICGWDFGFRRNNKFDLKKTRVLLGNESCTLTLSESTMNTLKCTVGPAMNKHFNMSIIISNGHGTTQYSTFSYVDPVITSISPKYGPMAGGTLLTLTGNYLNSGNSRHISIGGKTCTLKSVSNSILECYTPAQTISTEFAVKLKIDLANRETSIFSYREDPIVYEIHPTKSFISGGSTITGVGKNLNSVSVPRMVINVHEAGRNFTVACQHRSNSEIICCTTPSLQQLNLQLPLKTKAFFMLDGILSKYFDLIYVHNPVFKPFEKPVMISMGNENVLEIKGNDIDPEAVKGEVLKVGNKSCENIHLHSEAVLCTVPNDLLKLNSELNIEWKQAISSTVLGKVIVQPDQNFTGLIAGVVSISTALLLLLGFFLWLKKRKQIKDLGSELVRYDARVHTPHLDRLVSARSVSPTTEMVSNESVDYRATFPEDQFPNSSQNGSCRQVQYPLTDMSPILTSGDSDISSPLLQNTVHIDLSALNPELVQAVQHVVIGPSSLIVHFNEVIGRGHFGCVYHGTLLDNDGKKIHCAVKSLNRITDIGEVSQFLTEGIIMKDFSHPNVLSLLGICLRSEGSPLVVLPYMKHGDLRNFIRNETHNPTVKDLIGFGLQVAKGMKYLASKKFVHRDLAARNCMLDEKFTVKVADFGLARDMYDKEYYSVHNKTGAKLPVKWMALESLQTQKFTTKSDVWSFGVLLWELMTRGAPPYPDVNTFDITVYLLQGRRLLQPEYCPDPLYEVMLKCWHPKAEMRPSFSELVSRISAIFSTFIGEHYVHVNATYVNVKCVAPYPSLLSSEDNADDEVDTRPASFWETS

SEQ ID NO: 217 - protein, 134 aa, Homo sapiens
PMRKHVLAASFSMLSLLVIMGDTDSKTDSSFIMDSDPRRCMRHHYVDSISHPLYKCSSKMVLLARCEGHCSQASRSEPLVSFSTVLKQPFRSSCHCCRPQTSKLKALRLRCSGGMRLTATYRYILSCHCEECNS

SEQ ID NO: 218 - protein, 2819 aa, Homo sapiens
PMAAHRPVEWVQAVVSRFDEQLPIKTGQQNTHTKVSTEHNKECLINISKYKFSLVISGLTTILKNVNNMRIFGEAAEKNLYLSQLIILDTLEKCLAGQPKDTMRLDETMLVKQLLPEICHFLHTCREGNQHAAELRNSASGVLFSLSCNNFNAVFSRISTRLQELTVCSEDNVDVHDIELLQYINVDCAKLKRLLKETAFKFKALKKVAQLAVINSLEKAFWNWVENYPDEFTKLYQIPQTDMAECAEKLFDLVDGFAESTKRKAAVWPLQIILLILCPEIIQDISKDVVDENNMNKKLFLDSLRKALAGHGGSRQLTESAAIACVKLCKASTYINWEDNSVIFLLVQSMVVDLKNLLFNPSKPFSRGSQPADVDLMIDCLVSCFRISPHNNQHFKICLAQNSPSTFHYVLVNSLHRIITNSALDWWPKIDAVYCHSVELRNMFGETLHKAVQGCGAHPAIRMAPSLTFKEKVTSLKFKEKPTDLETRSYKYLLLSMVKLIHADPKLLLCNPRKQGPETQGSTAELITGLVQLVPQSHMPEIAQEAMEALLVLHQLDSIDLWNPDAPVETFWEISSQMLFYICKKLTSHQMLSSTEILKWLREILICRNKFLLKNKQADRSSCHFLLFYGVGCDIPSSGNTSQMSMDHEELLRTPGASLRKGKGNSSMDSAAGCSGTPPICRQAQTKLEVALYMFLWNPDTEAVLVAMSCFRHLCEEADIRCGVDEVSVHNLLPNYNTFMEFASVSNMMSTGRAALQKRVMALLRRIEHPTAGNTEAWEDTHAKWEQATKLILNYPKAKMEDGQAAESLHKTIVKRRMSHVSGGGSIDLSDTDSLQEWINMTGFLCALGGVCLQQRSNSGLATYSPPMGPVSERKGSMISVMSSEGNADTPVSKFMDRLLSLMVCNHEKVGLQIRTNVKDLVGLELSPALYPMLFNKLKNTISKFFDSQGQVLLTDTNTQFVEQTIAIMKNLLDNHTEGSSEHLGQASIETMMLNLVRYVRVLGNMVHAIQIKTKLCQLVEVMMARRDDLSFCQEMKFRNKMVEYLTDWVMGTSNQAADDDVKCLTRDLDQASMEAVVSLLAGLPLQPEEGDGVELMEAKSQLFLKYFTLFMNLLNDCSEVEDESAQTGGRKRGMSRRLASLRHCTVLAMSNLLNANVDSGLMHSIGLGYHKDLQTRATFMEVLTKILQQGTEFDTLAETVLADRFERLVELVTMMGDQGELPIAMALANVVPCSQWDELARVLVTLFDSRHLLYQLLWNMFSKEVELADSMQTLFRGNSLASKIMTFCFKVYGATYLQKLLDPLLRIVITSSDWQHVSFEVDPTRLEPSESLEENQRNLLQMTEKFFHAIISSSSEFPPQLRSVCHCLYQVVSQRFPQNSIGAVGSAMFLRFINPAIVSPYEAGILDKKPPPRIERGLKLMSKILQSIANHVLFTKEEHMRPFNDFVKSNFDAARRFFLDIASDCPTSDAVNHSLSFISDGNVLALHRLLWNNQEKIGQYLSSNRDHKAVGRRPFDKMATLLAYLGPPEHKPVADTHWSSLNLTSSKFEEFMTRHQVHEKEEFKALKTLSIFYQAGTSKAGNPIFYYVARRFKTGQINGDLLIYHVLLTLKPYYAKPYEIVVDLTHTGPSNRFKTDFLSKWFVVFPGFAYDNVSAVYIYNCNSWVREYTKYHERLLTGLKGSKRLVFIDCPGKLAEHIEHEQQKLPAATLALEEDLKVFHNALKLAHKDTKVSIKVGSTAVQVTSAERTKVLGQSVFLNDIYYASEIEEICLVDENQFTLTIANQGTPLTFMHQECEAIVQSIIHIRTRWELSQPDSIPQHTKIRPKDVPGTLLNIALLNLGSSDPSLRSAAYNLLCALTCTFNLKIEGQLLETSGLCIPANNTLFIVSISKTLAANEPHLTLEFLEECISGFSKSSIELKHLCLEYMTPWLSNLVRFCKHNDDAKRQRVTAILDKLITMTINEKQMYPSIQAKIWGSLGQITDLLDVVLDSFIKTSATGGLGSIKAEVMADTAVALASGNVKLVSSKVIGRMCKIIDKTCLSPTPTLEQHLMWDDIAILARYMLMLSFNNSLDVAAHLPYLFHVVTFLVATGPLSLRASTHGLVINIIHSLCTCSQLHFSEETKQVLRLSLTEFSLPKFYLLFGISKVKSAAVIAFRSSYRDRSFSPGSYERETFALTSLETVTEALLEIMEACMRDIPTCKWLDQWTELAQRFAFQYNPSLQPRALVVFGCISKRVSHGQIKQIIRILSKALESCLKGPDTYNSQVLIEATVIALTKLQPLLNKDSPLHKALFWVAVAVLQLDEVNLYSAGTALLEQNLHTLDSLRIFNDKSPEEVFMAIRNPLEWHCKQMDHFVGLNFNSNFNFALVGHLLKGYRHPSPAIVARTVRILHTLLTLVNKHRNCDKFEVNTQSVAYLAALLTVSEEVRSRCSLKHRKSLLLTDISMENVPMDTYPIHHGDPSYRTLKETQPWSSPKGSEGYLAATYPTVGQTSPRARKSMSLDMGQPSQANTKKLLGTRKSFDHLISDTKAPKRQEMESGITTPPKMRRVAETDYEMETQRISSSQQHPHLRKVSVSESNVLLDEEVLTDPKIQALLLTVLATLVKYTTDEFDQRILYEYLAEASVVFPKVFPVVHNLLDSKINTLLSLCQDPNLLNPIHGIVQSVVYHEESPPQYQTSYLQSFGFNGLWRFAGPFSKQTQIPDYAELIVKFLDALIDTYLPGIDEETSEESLLTPTSPYPPALQSQLSITANLNLSNSMTSLATSQHSPGIDKENVELSPTTGHCNSGRTRHGSASQVQKQRSAGSFKRNSIKKIV

SEQ ID NO: 219 - protein, 1236 aa, Homo sapiens
PMRSRSNSGVRLDGYARLVQQTILCYQNPVTGLLSASHEQKDAWVRDNIYSILAVWGLGMAYRKNADRDEDKAKAYELEQNVVKLMRGLLQCMMRQVAKVEKFKHTQSTKDSLHAKYNTATCGTVVGDDQWGHLQVDATSLFLLFLAQMTASGLRIIFTLDEVAFIQNLVFYIEAAYKVADYGMWERGDKTNQGIPELNASSVGMAKAALEAIDELDLFGAHGGRKSVIHVLPDEVEHCQSILFSMLPRASTSKEIDAGLLSIISFPAFAVEDVNLVNVTKNEIISKLQGRYGCCRFLRDGYKTPREDPNRLHYDPAELKLFENIECEWPVFWTYFIIDGVFSGDAVQVQEYREALEGILIRGKNGIRLVPELYAVPPNKVDEEYKNPHTVDRVPMGKVPHLWGQSLYILSSLLAEGFLAAGEIDPLNRRFSTSVKPDVVVQVTVLAENNHIKDLLRKHGVNVQSIADIHPIQVQPGRILSHIYAKLGRNKNMNLSGRPYRHIGVLGTSKLYVIRNQIFTFTPQFTDQHHFYLALDNEMIVEMLRIELAYLCTCWRMTGRPTLTFPISRTMLTNDGSDIHSAVLSTIRKLEDGYFGGARVKLGNLSEFLTTSFYTYLTFLDPDCDEKLFDNASEGTFSPDSDSDLVGYLEDTCNQESQDELDHYINHLLQSTSLRSYLPPLCKNTEDRHVFSAIHSTRDILSVMAKAKGLEVPFVPMTLPTKVLSAHRKSLNLVDSPQPLLEKVPESDFQWPRDDHGDVDCEKLVEQLKDCSNLQDQADILYILYVIKGPSWDTNLSGQHGVTVQNLLGELYGKAGLNQEWGLIRYISGLLRKKVEVLAEACTDLLSHQKQLTVGLPPEPREKIISAPLPPEELTKLIYEASGQDISIAVLTQEIVVYLAMYVRAQPSLFVEMLRLRIGLIIQVMATELARSLNCSGEEASESLMNLSPFDMKNLLHHILSGKEFGVERSVRPIHSSTSSPTISIHEVGHTGVTKTERSGINRLRSEMKQMTRRFSADEQFFSVGQAASSSAHSSKSARSSTPSSPTGTSSSDSGGHHIGWGERQGQWLRRRRLDGAINRVPVGFYQRVWKILQKCHGLSIDGYVLPSSTTREMTPHEIKFAVHVESVLNRVPQPEYRQLLVEAIMVLTLLSDTEMTSIGGIIHVDQIVQMASQLFLQDQVSIGAMDTLEKDQATGICHFFYDSAPSGAYGTMTYLTRAVASYLQELLPNSGCQMQ

SEQ ID NO: 220 - protein, 355 aa, Homo sapiens
PMGRLVAVGLLGIALALLGERLLALRNRLKASREVESVDLPHCHLIKGIEAGSEDIDILPNGLAFFSVGLKFPGLHSFAPDKPGGILMMDLKEEKPRARELRISRGFDLASFNPHGISTFIDNDDTVYLFVVNHPEFKNTVEIFKFEEAENSLLHLKTVKHELLPSVNDITAVGPAHFYATNDHYFSDPFLKYLETYLNLHWANVVYYSPNEVKVVAEGFDSANGINISPDDKYIYVADILAHEIHVLEKHTNMNLTQLKVLELDTLVDNLSIDPSSGDIWVVCHPNGQKLFVYDPNNPPSSEVLRIQNILSEKPTVTTVYANNGSVLQGSSVASVYDGKLLIGTLYHRALYCEL

SEQ ID NO: 221 - protein, 816 aa, Homo sapiens
PMKSNQERSNECLPPKKREIPATSRSSEEKAPTLPSDNHRVEGTAWLPGNPGGRGHGGGRHGPAGTSVELGLQQGIGLHKALSTGLDYSPPSAPRSVPVATTLPAAYATPQPGTPVSPVQYAHLPHTFQFIGSSQYSGTYASFIPSQLIPPTANPVTSAVASAAGATTPSQRSQLEAYSTLLANMGSLSQTPGHKAEQQQQQQQQQQQQHQHQQQQQQQQQQQQQQHLSRAPGLITPGSPPPAQQNQYVHISSSPQNTGRTASPPAIPVHLHPHQTMIPHTLTLGPPSQVVMQYADSGSHFVPREATKKAESSRLQQAIQAKEVLNGEMEKSRRYGAPSSADLGLGKAGGKSVPHPYESRHVVVHPSPSDYSSRDPSGVRASVMVLPNSNTPAADLEVQQATHREASPSTLNDKSGLHLGKPGHRSYALSPHTVIQTTHSASEPLPVGLPATAFYAGTQPPVIGYLSGQQQAITYAGSLPQHLVIPGTQPLLIPVGSTDMEASGAAPAIVTSSPQFAAVPHTFVTTALPKSENFNPEALVTQAAYPAMVQAQIHLPVVQSVASPAAAPPTLPPYFMKGSIIQLANGELKKVEDLKTEDFIQSAEISNDLKIDSSTVERIEDSHSPGVAVIQFAVGEHRAQVSVEVLVEYPFFVFGQGWSSCCPERTSQLFDLPCSKLSVGDVCISLTLKNLKNGSVKKGQPVDPASVLLKHSKADGLAGSRHRYAEQENGINQGSAQMLSENGELKFPEKMGLPAAPFLTKIEPSKPAATRKRRWSAPESRKLEKSEDEPPLTLPKPSLIPQEVKICIEGRSNVGK

SEQ ID NO: 222 - protein, 486 aa, Homo sapiens
PMELEVRRVRQAFLSGRSRPLRFRLQQLEALRRMVQEREKDILTAIAADLCKSEFNVYSQEVITVLGEIDFMLENLPEWVTAKPVKKNVLTMLDEAYIQPQPLGVVLIIGAWNYPFVLTIQPLIGAIAAGNAVIIKPSELSENTAKILAKLLPQYLDQDLYIVINGGVEETTELLKQRFDHIFYTGNTAVGKIVMEAAAKHLTPVTLELGGKSPCYIDKDCDLDIVCRRITWGKYMNCGQTCIAPDYILCEASLQNQIVWKIKETVKEFYGENIKESPDYERIINLRHFKRILSLLEGQKIAFGGETDEATRYIAPTVLTDVDPKTKVMQEEIFGPILPIVPVKNVDEAINFINEREKPLALYVFSHNHKLIKRMIDETSSGGVTGNDVIMHFTLNSFPFGGVGSSGMGAYHGKHSFDTFSHQRPCLLKSLKREGANKLRYPPNSQSKVDWGKFFLLKRFNKEKLGLLLLTFLGIVAAVLVKAEYY

SEQ ID NO: 223 - protein, 349 aa, Homo sapiens
PMAEKVLVTGGAGYIGSHTVLELLEAGYLPVVIDNFHNAFRGGGSLPESLRRVQELTGRSVEFEEMDILDQGALQRLFKKYSFMAVIHFAGLKAVGESVQKPLDYYRVNLTGTIQLLEIMKAHGVKNLVFSSSATVYGNPQYLPLDEAHPTGGCTNPYGKSKFFIEEMIRDLCQADKTWNAVLLRYFNPTGAHASGCIGEDPQGIPNNLMPYVSQVAIGRREALNVFGNDYDTEDGTGVRDYIHVVDLAKGHIAALRKLKEQCGCRIYNLGTGTGYSVLQMVQAMEKASGKKIPYKVVARREGDVAACYANPSLAQEELGWTAALGLDRMCEDLWRWQKQNPSGFGTQA

SEQ ID NO: 224 - protein, 203 aa, Homo sapiens
PMMQDVSSSPVSPADDSLSNSEEEPDRQQPPSGKRGGRKRRSSRRSAGGGAGPGGAAGGGVGGGDEPGSPAQGKRGKKSAGCGGGGGAGGGGGSSSGGGSPQSYEELQTQRVMANVRERQRTQSLNEAFAALRKIIPTLPSDKLSKIQTLKLAARYIDFLYQVLQSDELDSKMASCSYVAHERLSYAFSVWRMEGAWSMSASH

SEQ ID NO: 225 - protein, 473 aa, Homo sapiens
PMTTCSRQFTSSSSMKGSCGIGGGIGGGSSRISSVLAGGSCRAPSTYGGGLSVSSSRFSSGGAYGLGGGYGGGFSSSSSSFGSGFGGGYGGGLGAGLGGGFGGGFAGGDGLLVGSEKVTMQNLNDRLASYLDKVRALEEANADLEVKIRDWYQRQRPAEIKDYSPYFKTIEDLRNKILTATVDNANVLLQIDNARLAADDFRTKYETELNLRMSVEADINGLRRVLDELTLARADLEMQIESLKEELAYLKKNHEEEMNALRGQVGGDVNVEMDAAPGVDLSRILNEMRDQYEKMAEKNRKDAEEWFFTKTEELNREVATNSELVQSGKSEISELRRTMQNLEIELQSQLSMKASLENSLEETKGRYCMQLAQIQEMIGSVEEQLAQLRCEMEQQNQEYKILLDVKTRLEQEIATYRRLLEGEDAHLSSSQFSSGSQSSRDVTSSSRQIRTKVMDVHDGKVVSTHEQVLRTKN

SEQ ID NO: 226 - protein, 2139 aa, Homo sapiens
PMVNENTRMYIPEENHQGSNYGSPRPAHANMNANAAAGLAPEHIPTPGAALSWQAAIDAARQAKLMGSAGNATISTVSSTQRKRQQYGKPKKQGSTTATRPPRALLCLTLKNPIRRACISIVEWKSFEIIILLTIFANCVALAIYIPFPEDDSNATNSNLERVEYLFLIIFTVEAFLKVIAYGLLFHPNAYLRNGWNLLDFIIVVVGLFSAILEQATKADGANALGGKGAGFDVKALRAFRVLRPLRLVSGVPSLQVVLNSIIKAMVPLLHIALLVLFVIIIYAIIGLELFMGKMHKTCYNQEGIADVPAEDDPSPCALETGHGRQCQNGTVCKPGWDGPKHGITNFDNFAFAMLTVFQCITMEGWTDVLYWVNDAVGRDWPWIYFVTLIIIGSFFVLNLVLGVLSGEFSKEREKAKARGDFQKLREKQQLEEDLKGYLDWITQAEDIDPENEDEGMDEEKPRNMSMPTSETESVNTENVAGGDIEGENCGARLAHRISKSKFSRYWRRWNRFCRRKCRAAVKSNVFYWLVIFLVFLNTLTIASEHYNQPNWLTEVQDTANKALLALFTAEMLLKMYSLGLQAYFVSLFNRFDCFVVCGGILETILVETKIMSPLGISVLRCVRLLRIFKITRYWNSLSNLVASLLNSVRSIASLLLLLFLFIIIFSLLGMQLFGGKFNFDEMQTRRSTFDNFPQSLLTVFQILTGEDWNSVMYDGIMAYGGPSFPGMLVCIYFIILFICGNYILLNVFLAIAVDNLADAESLTSAQKEEEEEKERKKLARTASPEKKQELVEKPAVGESKEEKIELKSITADGESPPATKINMDDLQPNENEDKSPYPNPETTGEEDEEEPEMPVGPRPRPLSELHLKEKAVPMPEASAFFIFSSNNRFRLQCHRIVNDTIFTNLILFFILLSSISLAAEDPVQHTSFRNHILFYFDIVFTTIFTIEIALKMTAYGAFLHKGSFCRNYFNILDLLVVSVSLISFGIQSSAINVVKILRVLRVLRPLRAINRAKGLKHVVQCVFVAIRTIGNIVIVTTLLQFMFACIGVQLFKGKLYTCSDSSKQTEAECKGNYITYKDGEVDHPIIQPRSWENSKFDFDNVLAAMMALFTVSTFEGWPELLYRSIDSHTEDKGPIYNYRVEISIFFIIYIIIIAFFMMNIFVGFVIVTFQEQGEQEYKNCELDKNQRQCVEYALKARPLRRYIPKNQHQYKVWYVVNSTYFEYLMFVLILLNTICLAMQHYGQSCLFKIAMNILNMLFTGLFTVEMILKLIAFKPKHYFCDAWNTFDALIVVGSIVDIAITEVNPAEHTQCSPSMNAEENSRISITFFRLFRVMRLVKLLSRGEGIRTLLWTFIKSFQALPYVALLIVMLFFIYAVIGMQVFGKIALNDTTEINRNNNFQTFPQAVLLLFRCATGEAWQDIMLACMPGKKCAPESEPSNSTEGETPCGSSFAVFYFISFYMLCAFLIINLFVAVIMDNFDYLTRDWSILGPHHLDEFKRIWAEYDPEAKGRIKHLDVVTLLRRIQPPLGFGKLCPHRVACKRLVSMNMPLNSDGTVMFNATLFALVRTALRIKTEGNLEQANEELRAIIKKIWKRTSMKLLDQVVPPAGDDEVTVGKFYATFLIQEYFRKFKKRKEQGLVGKPSQRNALSLQAGLRTLHDIGPEIRRAISGDLTAEEELDKAMKEAVSAASEDDIFRRAGGLFGNHVSYYQSDGRSAFPQTFTTQRPLHINKAGSSQGDTESPSHEKLVDSTFTPSSYSSTGSNANINNANNTALGRLPRPAGYPSTVSTVEGHGPPLSPAIRVQEVAWKLSSNRCHSRESQAAMAGQEETSQDETYEVKMNHDTEACSEPSLLSTEMLSYQDDENRQLTLPEEDKRDIRQSPKRGFLRSASLGRRASFHLECLKRQKDRGGDISQKTVLPLHLVHHQALAVAGLSPLLQRSHSPASFPRPFATPPATPGSRGWPPQPVPTLRLEGVESSEKLNSSFPSIHCGSWAETTPGGGGSSAARRVRPVSLMVPSQAGAPGRQFHGSASSLVEAVLISEGLGQFAQDPKFIEVTTQELADACDMTIEEMESAADNILSGGAPQSPNGALLPFVNCRDAGQDRAGGEEDAGCVRARGRPSEEELQDSRVYVSSL

SEQ ID NO: 227 - protein, 485 aa, Homo sapiens
PMYDDSYVPGFEDSEAGSADSYTSRPSLDSDVSLEEDRESARREVESQAQQQLERAKHKPVAFAVRTNVSYCGVLDEECPVQGSGVNFEAKDFLHIKEKYSNDWWIGRLVKEGGDIAFIPSPQRLESIRLKQEQKARRSGNPSSLSDIGNRRSPPPSLAKQKQKQAEHVPPYDVVPSMRPVVLVGPSLKGYEVTDMMQKALFDFLKHRFDGRISITRVTADLSLAKRSVLNNPGKRTIIERSSARSSIAEVQSEIERIFELAKSLQLVVLDADTINHPAQLAKTSLAPIIVFVKVSSPKVLQRLIRSRGKSQMKHLTVQMMAYDKLVQCPPESFDVILDENQLEDACEHLAEYLEVYWRATHHPAPGPGLLGPPSAIPGLQNQQLLGERGEEHSPLERDSLMPSDEASESSRQAWTGSSQRSSRHLEEDYADAYQDLYQPHRQHTSGLPSANGHDPQDRLLAQDSEHNHSDRNWQRNRPWPKDSY

SEQ ID NO: 228 - protein, 172 aa, Homo sapiens
PMEHSTFLSGLVLATLLSQVSPFKIPIEELEDRVFVNCNTSITWVEGTVGTLLSDITRLDLGKRILDPRGIYRCNGTDIYKDKESTVQVHYRMCQSCVELDPATVAGIIVTDVIATLLLALGVFCFAGHETGRLSGAADTQALLRNDQVYQPLRDRDDAQYSHLGGNWARNK

SEQ ID NO: 229 - protein, 605 aa, Homo sapiens
PMLARALLLCAVLALSHTANPCCSHPCQNRGVCMSVGFDQYKCDCTRTGFYGENCSTPEFLTRIKLFLKPTPNTVHYILTHFKGFWNVVNNIPFLRNAIMSYVLTSRSHLIDSPPTYNADYGYKSWEAFSNLSYYTRALPPVPDDCPTPLGVKGKKQLPDSNEIVEKLLLRRKFIPDPQGSNMMFAFFAQHFTHQFFKTDHKRGPAFTNGLGHGVDLNHIYGETLARQRKLRLFKDGKMKYQIIDGEMYPPTVKDTQAEMIYPPQVPEHLRFAVGQEVFGLVPGLMMYATIWLREHNRVCDVLKQEHPEWGDEQLFQTSRLILIGETIKIVIEDYVQHLSGYHFKLKFDPELLFNKQFQYQNRIAAEFNTLYHWHPLLPDTFQIHDQKYNYQQFIYNNSILLEHGITQFVESFTRQIAGRVAGGRNVPPAVQKVSQASIDQSRQMKYQSFNEYRKRFMLKPYESFEELTGEKEMSAELEALYGDIDAVELYPALLVEKPRPDAIFGETMVEVGAPFSLKGLMGNVICSPAYWKPSTFGGEVGFQIINTASIQSLICNNVKGCPFTSFSVPDPELIKTVTINASSSRSGLDDINPTVLLKERSTEL

SEQ ID NO: 230 - protein, 449 aa, Homo sapiens
PMFDCMDVLSVSPGQILDFYTASPSSCMLQEKALKACFSGLTQTEWQHRHTAQSIETQSTSSEELVPSPPSPLPPPRVYKPCFVCQDKSSGYHYGVSACEGCKGFFRRSIQKNMIYTCHRDKNCVINKVTRNRCQYCRLQKCFEVGMSKESVRNDRNKKKKETSKQECTESYEMTAELDDLTEKIRKAHQETFPSLCQLGKYTTNSSADHRVRLDLGLWDKFSELATKCIIKIVEFAKRLPGFTGLTIADQITLLKAACLDILILRICTRYTPEQDTMTFSDGLTLNRTQMHNAGFGPLTDLVFTFANQLLPLEMDDTETGLLSAICLICGDRQDLEEPTKVDKLQEPLLEALKIYIRKRRPSKPHMFPKILMKITDLRSISAKGAERVITLKMEIPGSMPPLIQEMLENSEGHEPLTPSSSGNTAEHSPSISPSSVENSGVSQSPLVQ

SEQ ID NO: 231 - protein, 70 aa, Homo sapiens
PMDTSRVQPIKLARVTKVLGRTGSQGQCTQVRVEFMDDTSRSIIRNVKGPVREGDVLTLLESEREARRLR

SEQ ID NO: 232 - protein, 219 aa, Homo sapiens
PMGRLLALVVGAALVSSACGGCVEVDSETEAVYGMTFKILCISCKRRSETNAETFTEWTFRQKGTEEFVKILRYENEVLQLEEDERFEGRVVWNGSRGTKDLQDLSIFITNVTYNHSGDYECHVYRLLFFENYEHNTSVVKKIHIEVVDKANRDMASIVSEIMMYVLIVVLTIWLVAEMIYCYKKIAAATETAAQENASEYLAITSESKENCTGVQVAE

SEQ ID NO: 233 - protein, 737 aa, Homo sapiens
PMSLSENSVFAYESSVHSTNVLLSLNDQRKKDVLCDVTIFVEGQRFRAHRSVLAACSSYFHSRIVGQADGELNITLPEEVTVKGFEPLIQFAYTAKLILSKENVDEVCKCVEFLSVHNIEESCFQFLKFKFLDSTADQQECPRKKCFSSHCQKTDLKLSLLDQRDLETDEVEEFLENKNVQTPQCKLRRYQGNAKASPPLQDSASQTYESMCLEKDAALALPSLCPKYRKFQKAFGTDRVRTGESSVKDIHASVQPNERSENECLGGVPECRDLQVMLKCDESKLAMEPEETKKDPASQCPTEKSEVTPFPHNSSIDPHGLYSLSLLHTYDQYGDLNFAGMQNTTVLTEKPLSGTDVQEKTFGESQDLPLKSDLGTREDSSVASSDRSSVEREVAEHLAKGFWSDICSTDTPCQMQLSPAVAKDGSEQISQKRSECPWLGIRISESPEPGQRTFTTLSSVNCPFISTLSTEGCSSNLEIGNDDYVSEPQQEPCPYACVISLGDDSETDTEGDSESCSAREQECEVKLPFNAQRIISLSRNDFQSLLKMHKLTPEQLDCIHDIRRRSKNRIAAQRCRKRKLDCIQNLESEIEKLQSEKESLLKERDHILSTLGETKQNLTGLCQKVCKEAALSQEQIQILAKYSAADCPLSFLISEKDKSTPDGELALPSIFSLSDRPPAVLPPCARGNSEPGYARGQESQQMSTATSEQAGPAEQCRQSGGISDFCQQMTDKCTTDE

SEQ ID NO: 234 - protein, 397 aa, Homo sapiens
PMVAGTRCLLALLLPQVLLGGAAGLVPELGRRKFAAASSGRPSSQPSDEVLSEFELRLLSMFGLKQRPTPSRDAVVPPYMLDLYRRHSGQPGSPAPDHRLERAASRANTVRSFHHEESLEELPETSGKTTRRFFFNLSSIPTEEFITSAELQVFREQMQDALGNNSSFHHRINIYEIIKPATANSKFPVTRLLDTRLVNQNASRWESFDVTPAVMRWTAQGHANHGFVVEVAHLEEKQGVSKRHVRISRSLHQDEHSWSQIRPLLVTFGHDGKGHPLHKREKRQAKHKQRKRLKSSCKRHPLYVDFSDVGWNDWIVAPPGYHAFYCHGECPFPLADHLNSTNHAIVQTLVNSVNSKIPKACCVPTELSAISMLYLDENEKVVLKNYQDMVVEGCGCR

SEQ ID NO: 235 - protein, 278 aa, Homo sapiens
PMSSCSRVALVTGANRGIGLAIARELCRQFSGDVVLTARDVARGQAAVQQLQAEGLSPRFHQLDIDDLQSIRALRDFLRKEYGGLNVLVNNAAVAFKSDDPMPFDIKAEMTLKTNFFATRNMCNELLPIMKPHGRVVNISSLQCLRAFENCSEDLQERFHSETLTEGDLVDLMKKFVEDTKNEVHEREGWPNSPYGVSKLGVTVLSRILARRLDEKRKADRILVNACCPGPVKTDMDGKDSIRTVEEGAETPVYLALLPPDATEPQGQLVHDKVVQNW

SEQ ID NO: 236 - protein, 327 aa, Homo sapiens
PMEKDGLCRADQQYECVAEIGEGAYGKVFKARDLKNGGRFVALKRVRVQTGEEGMPLSTIREVAVLRHLETFEHPNVVRLFDVCTVSRTDRETKLTLVFEHVDQDLTTYLDKVPEPGVPTETIKDMMFQLLRGLDFLHSHRVVHRDLKPQNILVTSSGQIKLADFGLARIYSFQMALTSVVVTLWYRAPEVLLQSSYATPVDLWSVGCIFAEMFRRKPLFRGSSDVDQLGKILDVIGLPGEEDWPRDVALPRQAFHSKSAQPIEKFVTDIDELGKDLLLKCLTFNPAKRISAYSALSHPYFQDLERCKENLDSHLPPSQNTSELNTA

SEQ ID NO: 237 - protein, 502 aa, Homo sapiens
PMPSASASRKSQEKPREIMDAAEDYAKERYGISSMIQSQEKPDRVLVRVRDLTIQKADEVVWVRARVHTSRAKGKQCFLVLRQQQFNVQALVAVGDHASKQMVKFAANINKESIVDVEGVVRKVNQKIGSCTQQDVELHVQKIYVISLAEPRLPLQLDDAVRPEAEGEEEGRATVNQDTRLDNRVIDLRTSTSQAVFRLQSGICHLFRETLINKGFVEIQTPKIISAASEGGANVFTVSYFKNNAYLAQSPQLYKQMCICADFEKVFSIGPVFRAEDSNTHRHLTEFVGLDIEMAFNYHYHEVMEEIADTMVQIFKGLQERFQTEIQTVNKQFPCEPFKFLEPTLRLEYCEALAMLREAGVEMGDEDDLSTPNEKLLGHLVKEKYDTDFYILDKYPLAVRPFYTMPDPRNPKQSNSYDMFMRGEEILSGAQRIHDPQLLTERALHHGIDLEKIKAYIDSFRFGAPPHAGGGIGLERVTMLFLGLHNVRQTSMFPRDPKRLTP

SEQ ID NO: 238 - protein, 399 aa, Homo sapiens
PMRLREPLLSGSAAMPGASLQRACRLLVAVCALHLGVTLVYYLAGRDLSRLPQLVGVSTPLQGGSNSAAAIGQSSGELRTGGARPPPPLGASSQPRPGGDSSPVVDSGPGPASNLTSVPVPHTTALSLPACPEESPLLVGPMLIEFNMPVDLELVAKQNPNVKMGGRYAPRDCVSPHKVAIIIPFRNRQEHLKYWLYYLHPVLQRQQLDYGIYVINQAGDTIFNRAKLLNVGFQEALKDYDYTCFVFSDVDLIPMNDHNAYRCFSQPRHISVAMDKFGFSLPYVQYFGGVSALSKQQFLTINGFPNNYWGWGGEDDDIFNRLVFRGMSISRPNAVVGRCRMIRHSRDKKNEPNPQRFDRIAHTKETMLSDGLNSLTYQVLDVQRYPLYTQITVDIGTPS

SEQ ID NO: 239 - protein, 454 aa, Homo sapiens
PMASPSLPGSDCSQIIDHSHVPEFEVATWIKITLILVYLIIFVMGLLGNSATIRVTQVLQKKGYLQKEVTDHMVSLACSDILVFLIGMPMEFYSIIWNPLTTSSYTLSCKLHTFLFEACSYATLLHVLTLSFERYIAICHPFRYKAVSGPCQVKLLIGFVWVTSALVALPLLFAMGTEYPLVNVPSHRGLTCNRSSTRHHEQPETSNMSICTNLSSRWTVFQSSIFGAFVVYLVVLLSVAFMCWNMMQVLMKSQKGSLAGGTRPPQLRKSESEESRTARRQTIIFLRLIVVTLAVCWMPNQIRRIMAAAKPKHDWTRSYFRAYMILLPFSETFFYLSSVINPLLYTVSSQQFRRVFVQVLCCRLSLQHANHEKRLRVHAHSTTDSARFVQRPLLFASRRQSSARRTEKIFLSTFQSEAEPQSKSQSLSLESLEPNSGAKPANSAAENGFQEHEV

SEQ ID NO: 240 - protein, 84 aa, Homo sapiens
PMRLFLSLPVLVVVLSIVLEGPAPAQGTPDVSSALDKLKEFGNTLEDKARELISRIKQSELSAKMREWFSETFQKVKEKLKIDS

SEQ ID NO: 241 - protein, 304 aa, Homo sapiens
PMARGKAKEEGSWKKFIWNSEKKEFLGRTGGSWFKILLFYVIFYGCLAGIFIGTIQVMLLTISEFKPTYQDRVAPPGLTQIPQIQKTEISFRPNDPKSYEAYVLNIVRFLEKYKDSAQRDDMIFEDCGDVPSEPKERGDFNHERGERKVCRFKLEWLGNCSGLNDETYGYKEGKPCIIIKLNRVLGFKPKPPKNESLETYPVMKYNPNVLPVQCTGKRDEDKDKVGNVEYFGLGNSPGFPLQYYPYYGKLLQPKYLQPLLAVQFTNLTMDTEIRIECKAYGENIGYSEKDRFQGRFDVKIEVKS

SEQ ID NO: 242 - protein, 474 aa, Homo sapiens
PMLKVTVPSCSASSCSSVTASAAPGTASLVPDYWIDGSNRDALSDFFEVESELGRGATSIVYRCKQKGTQKPYALKVLKKTVDKKIVRTEIGVLLRLSHPNIIKLKEIFETPTEISLVLELVTGGELFDRIVEKGYYSERDAADAVKQILEAVAYLHENGIVHRDLKPENLLYATPAPDAPLKIADFGLSKIVEHQVLMKTVCGTPGYCAPEILRGCAYGPEVDMWSVGIITYILLCGFEPFYDERGDQFMFRRILNCEYYFISPWWDEVSLNAKDLVRKLIVLDPKKRLTTFQALQHPWVTGKAANFVHMDTAQKKLQEFNARRKLKAAVKAVVASSRLGSASSSHGSIQESHKASRDPSPIQDGNEDMKAIPEGEKIQGDGAQAAVKGAQAELMKVQALEKVKGADINAEEAPKMVPKAVEDGIKVADLELEEGLAEEKLKTVEEAAAPREGQGSSAVGFEVPQQDVILPEY

SEQ ID NO: 243 - protein, 278 aa, Homo sapiens
PMSSGIHVALVTGGNKGIGLAIVRDLCRLFSGDVVLTARDVTRGQAAVQQLQAEGLSPRFHQLDIDDLQSIRALRDFLRKEYGGLDVLVNNAGIAFKVADPTPFHIQAEVTMKTNFFGTRDVCTELLPLIKPQGRVVNVSSIMSVRALKSCSPELQQKFRSETITEEELVGLMNKFVEDTKKGVHQKEGWPSSAYGVTKIGVTVLSRIHARKLSEQRKGDKILLNACCPGWVRTDMAGPKATKSPEEGAETPVYLALLPPDAEGPHGQFVSEKRVEQW

SEQ ID NO: 244 - protein, 290 aa, Homo sapiens
PMELLCHEVDPVRRAVRDRNLLRDDRVLQNLLTIEERYLPQCSYFKCVQKDIQPYMRRMVATWMLEVCEEQKCEEEVFPLAMNYLDRFLAGVPTPKSHLQLLGAVCMFLASKLKETSPLTAEKLCIYTDNSIKPQELLEWELVVLGKLKWNLAAVTPHDFIEHILRKLPQQREKLSLIRKHAQTFIALCATDFKFAMYPPSMIATGSVGAAICGLQQDEEVSSLTCDALTELLAKITNTDVDCLKACQEQIEAVLLNSLQQYRQDQRDGSKSEDELDQASTPTDVRDIDL

SEQ ID NO: 245 - protein, 502 aa, Homo sapiens
PMQVCSQPQRGCVREQSAINTAPPSAHNAASPGGARGHRVPLTEACKDSRIGGMMKTLLLFVGLLLTWESGQVLGDQTVSDNELQEMSNQGSKYVNKEIQNAVNGVKQIKTLIEKTNEERKTLLSNLEEAKKKKEDALNETRESETKLKELPGVCNETMMALWEECKPCLKQTCMKFYARVCRSGSGLVGRQLEEFLNQSSPFYFWMNGDRIDSLLENDRQQTHMLDVMQDHFSRASSIIDELFQDRFFTREPQDTYHYLPFSLPHRRPHFFFPKSRIVRSLMPFSPYEPLNFHAMFQPFLEMIHEAQQAMDIHFHSPAFQHPPTEFIREGDDDRTVCREIRHNSTGCLRMKDQCDKCREILSVDCSTNNPSQAKLRRELDESLQVAERLTRKYNELLKSYQWKMLNTSSLLEQLNEQFNWVSRLANLTQGEDQYYLRVTTVASHTSDSDVPSGVTEVVVKLFDSDPITVTVPVEVSRKNPKFMETVAEKALQEYRKKHREE

SEQ ID NO: 246 - protein, 958 aa, Homo sapiens
PMNFAEREGSKRYCIQTKHVAILCAVVVGVGLIVGLAVGLTRSCDSSGDGGPGTAPAPSHLPSSTASPSGPPAQDQDICPASEDESGQWKNFRLPDFVNPVHYDLHVKPLLEEDTYTGTVSISINLSAPTRYLWLHLRETRITRLPELKRPSGDQVQVRRCFEYKKQEYVVVEAEEELTPSSGDGLYLLTMEFAGWLNGSLVGFYRTTYTENGRVKSIVATDHEPTDARKSFPCFDEPNKKATYTISITHPKEYGALSNMPVAKEESVDDKWTRTTFEKSVPMSTYLVCFAVHQFDSVKRISNSGKPLTIYVQPEQKHTAEYAANITKSVFDYFEEYFAMNYSLPKLDKIAIPDFGTGAMENWGLITYRETNLLYDPKESASSNQQRVATVVAHELVHQWFGNIVTMDWWEDLWLNEGFASFFEFLGVNHAETDWQMRDQMLLEDVLPVQEDDSLMSSHPIIVTVTTPDEITSVFDGISYSKGSSILRMLEDWIKPENFQKGCQMYLEKYQFKNAKTSDFWAALEEASRLPVKEVMDTWTRQMGYPVLNVNGVKNITQKRFLLDPRANPSQPPSDLGYTWNIPVKWTEDNITSSVLFNRSEKEGITLNSSNPSGNAFLKINPDHIGFYRVNYEVATWDSIATALSLNHKTFSSADRASLIDDAFALARAQLLDYKVALNLTKYLKREENFLPWQRVISAVTYIISMFEDDKELYPMIEEYFQGQVKPIADSLGWNDAGDHVTKLLRSSVLGFACKMGDREALNNASSLFEQWLNGTVSLPVNLRLLVYRYGMQNSGNEISWNYTLEQYQKTSLAQEKEKLLYGLASVKNVTLLSRYLDLLKDTNLIKTQDVFTVIRYISYNSYGKNMAWNWIQLNWDYLVNRYTLNNRNLGRIVTIAEPFNTELQLWQMESFFAKYPQAGAGEKPREQVLETVKNNIEWLKQHRNTIREWFFNLLESG

SEQ ID NO: 247 - protein, 148 aa, Homo sapiens
PMSFRFGQHLIKPSVVFLKTELSFALVNRKPVVPGHVLVCPLRPVERFHDLRPDEVADLFQTTQRVGTVVEKHFHGTSLTFSMQDGPEAGQTVKHVHVHVLPRKAGDFHRNDSIYEELQKHDKEDFPASWRSEEEMAAEAAALRVYFQ

SEQ ID NO: 248 - protein, 460 aa, Homo sapiens
PMTAEEMKATESGAQSAPLPMEGVDISPKQDEGVLKVIKREGTGTEMPMIGDRVFVHYTGWLLDGTKFDSSLDRKDKFSFDLGKGEVIKAWDIAIATMKVGEVCHITCKPEYAYGSAGSPPKIPPNATLVFEVELFEFKGEDLTEEEDGGIIRRIQTRGEGYAKPNEGAIVEVALEGYYKDKLFDQRELRFEIGEGENLDLPYGLERAIQRMEKGEHSIVYLKPSYAFGSVGKEKFQIPPNAELKYELHLKSFEKAKESWEMNSEEKLEQSTIVKERGTVYFKEGKYKQALLQYKKIVSWLEYESSFSNEEAQKAQALRLASHLNLAMCHLKLQAFSAAIESCNKALELDSNNEKGLFRRGEAHLAVNDFELARADFQKVLQLYPNNKAAKTQLAVCQQRIRRQLAREKKLYANMFERLAEEENKAKAEASSGDHPTDTEMKEEQKSNTAGSQSQVETEA

SEQ ID NO: 249 - protein, 559 aa, Homo sapiens
PMAKKVAVIGAGVSGLSSIKCCVDEDLEPTCFERSDDIGGLWKFTESSKDGMTRVYKSLVTNVCKEMSCYSDFPFHEDYPNFMNHEKFWDYLQEFAEHFDLLKYIQFKTTVCSITKRPDFSETGQWDVVTETEGKQNRAVFDAVMVCTGHFLNPHLPLEAFPGIHKFKGQILHSQEYKIPEGFQGKRVLVIGLGNTGGDIAVELSRTAAQVLLSTRTGTWVLGRSSDWGYPYNMMVTRRCCSFIAQVLPSRFLNWIQERKLNKRFNHEDYGLSITKGKKAKFIVNDELPNCILCGAITMKTSVIEFTETSAVFEDGTVEENIDVVIFTTGYTFSFPFFEEPLKSLCTKKIFLYKQVFPLNLERATLAIIGLIGLKGSILSGTELQARWVTRVFKGLCKIPPSQKLMMEATEKEQLIKRGVFKDTSKDKFDYIAYMDDIAACIGTKPSIPLLFLKDPRLAWEVFFGPCTPYQYRLMGPGKWDGARNAILTQWDRTLKPLKTRIVPDSSKPASMSHYLKAWGAPVLLASLLLICKSSLFLKLVRDKLQDRMSPYLVSLWRG

SEQ ID NO: 250 - protein, 194 aa, Homo sapiens
PMGKQNSKLRPEMLQDLRENTEFSELELQEWYKGFLKDCPTGILNVDEFKKIYANFFPYGDASKFAEHVFRTFDTNSDGTIDFREFIIALSVTSRGRLEQKLMWAFSMYDLDGNGYISREEMLEIVQAIYKMVSSVMKMPEDESTPEKRTEKIFRQMDTNNDGKLSLEEFIRGAKSDPSIVRLLQCDPSSASQF

SEQ ID NO: 251 - protein, 270 aa, Homo sapiens
PMSSYFVNSFSGRYPNGPDYQLLNYGSGSSLSGSYRDPAAMHTGSYGYNYNGMDLSVNRSSASSSHFGAVGESSRAFPAPAQEPRFRQAASSCSLSSPESLPCTNGDSHGAKPSASSPSDQATSASSSANFTEIDEASASSEPEEAASQLSSPSLARAQPEPMATSTAAPEGQTPQIFPWMRKLHISHDMTGPDGKRARTAYTRYQTLELEKEFHFNRYLTRRRRIEIAHALCLSERQIKIWFQNRRMKWKKDNKLKSMSLATAGSAFQP

SEQ ID NO: 252 - protein, 418 aa, Homo sapiens
PMAQKEGGRTVPCCSRPKVAALTAGTLLLLTAIGAASWAIVAVLLRSDQEPLYPVQVSSADARLMVFDKTEGTWRLLCSSRSNARVAGLSCEEMGFLRALTHSELDVRTAGANGTSGFFCVDEGRLPHTQRLLEVISVCDCPRGRFLAAICQDCGRRKLPVDRIVGGRDTSLGRWPWQVSLRYDGAHLCGGSLLSGDWVLTAAHCFPERNRVLSRWRVFAGAVAQASPHGLQLGVQAVVYHGGYLPFRDPNSEENSNDIALVHLSSPLPLTEYIQPVCLPAAGQALVDGKICTVTGWGNTQYYGQQAGVLQEARVPIISNDVCNGADFYGNQIKPKMFCAGYPEGGIDACQGDSGGPFVCEDSISRTPRWRLCGIVSWGTGCALAQKPGVYTKVSDFREWIFQAIKTHSEASGMVTQL

SEQ ID NO: 253 - protein, 154 aa, Homo sapiens
PMAPAAATGGSTLPSGFSVFTTLPDLLFIFEFIFGGLVWILVASSLVPWPLVQGWVMFVSVFCFVATTTLIILYIIGAHGGETSWVTLDAAYHCTAALFYLSASVLEALATITMQDGFTYRHYHENIAAVVFSYIATLLYVVHAVFSLIRWKSS

SEQ ID NO: 254 - protein, 474 aa, Homo sapiens
PMGRKKIQITRIMDERNRQVTFTKRKFGLMKKAYELSVLCDCEIALIIFNSTNKLFQYASTDMDKVLLKYTEYNEPHESRTNSDIVETLRKKGLNGCDSPDPDADDSVGHSPESEDKYRKINEDIDLMISRQRLCAVPPPNFEMPVSIPVSSHNSLVYSNPVSSLGNPNLLPLAHPSLQRNSMSPGVTHRPPSAGNTGGLMGGDLTSGAGTSAGNGYGNPRNSPGLLVSPGNLNKNMQAKSPPPMNLGMNNRKPDLRVLIPPGSKNTMPSVSEDVDLLLNQRINNSQSAQSLATPVVSVATPTLPGQGMGGYPSAISTTYGTEYSLSSADLSSLSGFNTASALHLGSVTGWQQQHLHNMPPSALSQLGACTSTHLSQSSNLSLPSTQSLNIKSEPVSPPRDRTTTPSRYPQHTRHEAGRSPVDSLSSCSSSYDGSDREDHRNEFHSPIGLTRPSPDERESPSVKRMRLSEGWAT

SEQ ID NO: 255 - protein, 208 aa, Homo sapiens
PMDKDCEMKRTTLDSPLGKLELSGCEQGLHEIKLLGKGTSAADAVEVPAPAAVLGGPEPLMQCTAWLNAYFHQPEAIEEFPVPALHHPVFQQESFTRQVLWKLLKVVKFGEVISYQQLAALAGNPKAARAVGGAMRGNPVPILIPCHRVVCSSGAVGNYSGGLAVKEWLLAHEGHRLGKPGLGGSSGLAGAWLKGAGATSGSPPAGRN

SEQ ID NO: 256 - protein, 701 aa, Homo sapiens
PMSRRTRCEDLDELHYQDTDSDVPEQRDSKCKVKWTHEEDEQLRALVRQFGQQDWKFLASHFPNRTDQQCQYRWLRVLNPDLVKGPWTKEEDQKVIELVKKYGTKQWTLIAKHLKGRLGKQCRERWHNHLNPEVKKSCWTEEEDRIICEAHKVLGNRWAEIAKMLPGRTDNAVKNHWNSTIKRKVDTGGFLSESKDCKPPVYLLLELEDKDGLQSAQPTEGQGSLLTNWPSVPPTIKEEENSEEELAAATTSKEQEPIGTDLDAVRTPEPLEEFPKREDQEGSPPETSLPYKWVVEAANLLIPAVGSSLSEALDLIESDPDAWCDLSKFDLPEEPSAEDSINNSLVQLQASHQQQVLPPRQPSALVPSVTEYRLDGHTISDLSRSSRGELIPISPSTEVGGSGIGTPPSVLKRQRKRRVALSPVTENSTSLSFLDSCNSLTPKSTPVKTLPFSPSQFLNFWNKQDTLELESPSLTSTPVCSQKVVVTTPLHRDKTPLHQKHAAFVTPDQKYSMDNTPHTPTPFKNALEKYGPLKPLPQTPHLEEDLKEVLRSEAGIELIIEDDIRPEKQKRKPGLRRSPIKKVRKSLALDIVDEDVKLMMSTLPKSLSLPTTAPSNSSSLTLSGIKEDNSLLNQGFLQAKPEKAAVAQKPRSHFTTPAPMSSAWKTVACGGTRDQLFMQEKARQLLGRLKPSHTSRTLILS

SEQ ID NO: 257 - protein, 791 aa, Homo sapiens
PMSRRRHSDENDGGQPHKRRKTSDANETEDHLESLICKVGEKSACSLESNLEGLAGVLEADLPNYKSKILRLLCTVARLLPEKLTIYTTLVGLLNARNYNFGGEFVEAMIRQLKESLKANNYNEAVYLVRFLSDLVNCHVIAAPSMVAMFENFVSVTQEEDVPQVRRDWYVYAFLSSLPWVGKELYEKKDAEMDRIFANTESYLKRRQKTHVPMLQVWTADKPHPQEEYLDCLWAQIQKLKKDRWQERHILRPYLAFDSILCEALQHNLPPFTPPPHTEDSVYPMPRVIFRMFDYTDDPEGPVMPGSHSVERFVIEENLHCIIKSHWKERKTCAAQLVSYPGKNKIPLNYHIVEVIFAELFQLPAPPHIDVMYTTLLIELCKLQPGSLPQVLAQATEMLYMRLDTMNTTCVDRFINWFSHHLSNFQFRWSWEDWSDCLSQDPESPKPKFVREVLEKCMRLSYHQRILDIVPPTFSALCPANPTCIYKYGDESSNSLPGHSVALCLAVAFKSKATNDEIFSILKDVPNPNQDDDDDEGFSFNPLKIEVFVQTLLHLAAKSFSHSFSALAKFHEVFKTLAESDEGKLHVLRVMFEVWRNHPQMIAVLVDKMIRTQIVDCAAVANWIFSSELSRDFTRLFVWEILHSTIRKMNKHVLKIQKELEEAKEKLARQHKRRSDDDDRSSDRKDGVLEEQIERLQEKVESAQSEQKNLFLVIFQRFIMILTEHLVRCETDGTSVLTPWYKNCIERLQQIFLQHHQIIQQYMVTLENLLFTAELDPHILAVFQQFCALQA

SEQ ID NO: 258 - protein, 433 aa, Homo sapiens
PMPAGRAARTCALLALCLLGAGAQDFGPTRFICTSVPVDADMCAASVAAGGAEELRSSVLQLRETVLQQKETILSQKETIRELTAKLGRCESQSTLDPGAGEARAGGGRKQPGSGKNTMGDLSRTPAAETLSQLGQTLQSLKTRLENLEQYSRLNSSSQTNSLKDLLQSKIDELERQVLSRVNTLEEGKGGPRNDTEERVKIETALTSLHQRISELEKGQKDNRPGDKFQLTFPLRTNYMYAKVKKSLPEMYAFTVCMWLKSSATPGVGTPFSYAVPGQANELVLIEWGNNPMEILINDKVAKLPFVINDGKWHHICVTWTTRDGVWEAYQDGTQGGSGENLAPYHPIKPQGVLVLGQEQDTLGGGFDATQAFVGELAHFNIWDRKLTPGEVYNLATCSTKALSGNVIAWAESHIEIYGGATKWTFEACRQIN

SEQ ID NO: 259 - protein, 545 aa, Homo sapiens
PMSDGLDNEEKPPAPPLRMNSNNRDSSALNHSSKPLPMAPEEKNKKARLRSIFPGGGDKTNKKKEKERPEISLPSDFEHTIHVGFDAVTGEFTGIPEQWARLLQTSNITKLEQKKNPQAVLDVLKFYDSKETVNNQKYMSFTSGDKSAHGYIAAHPSSTKTASEPPLAPPVSEEEDEEEEEEEDENEPPPVIAPRPEHTKSIYTRSVVESIASPAVPNKEVTPPSAENANSSTLYRNTDRQRKKSKMTDEEILEKLRSIVSVGDPKKKYTRFEKIGQGASGTVYTALDIATGQEVAIKQMNLQQQPKKELIINEILVMRENKNPNIVNYLDSYLVGDELWVVMEYLAGGSLTDVVTETCMDEGQIAAVCRECLQALDFLHSNQVIHRDIKSDNILLGMDGSVKLTDFGFCAQITPEQSKRSTMVGTPYWMAPEVVTRKAYGPKVDIWSLGIMAIEMVEGEPPYLNENPLRALYLIATNGTPELQNPERLSAVFRDFLNRCLEMDVDRRGSAKELLQHPFLKLAKPLSSLTPLIIAAKEAIKNSSR

SEQ ID NO: 260 - protein, 404 aa, Homo sapiens
PMASQPPPPPKPWETRRIPGAGPGPGPGPTFQSADLGPTLMTRPGQPALTRVPPPILPRPSQQTGSSSVNTFRPAYSSFSSGYGAYGNSFYGGYSPYSYGYNGLGYNRLRVDDLPPSRFVQQAEESSRGAFQSIESIVHAFASVSMMMDATFSAVYNSFRAVLDVANHFSRLKIHFTKVFSAFALVRTIRYLYRRLQRMLGLRRGSENEDLWAESEGTVACLGAEDRAATSAKSWPIFLFFAVILGGPYLIWKLLSTHSDEVTDSINWASGEDDHVVARAEYDFAAVSEEEISFRAGDMLNLALKEQQPKVRGWLLASLDGQTTGLIPANYVKILGKRKGRKTVESSKVSKQQQSFTNPTLTKGATVADSLDEQEAAFESVFVETNKVPVAPDSIGKDGEKQDL

SEQ ID NO: 261 - protein, 432 aa, Homo sapiens
PMRALLARLLLCVLVVSDSKGSNELHQVPSNCDCLNGGTCVSNKYFSNIHWCNCPKKFGGQHCEIDKSKTCYEGNGHFYRGKASTDTMGRPCLPWNSATVLQQTYHAHRSDALQLGLGKHNYCRNPDNRRRPWCYVQVGLKPLVQECMVHDCADGKKPSSPPEELKFQCGQKTLRPRFKIIGGEFTTIENQPWFAAIYRRHRGGSVTYVCGGSLISPCWVISATHCFIDYPKKEDYIVYLGRSRLNSNTQGEMKFEVENLILHKDYSADTLAHHNDIALLKIRSKEGRCAQPSRTIQTICLPSMYNDPQFGTSCEITGFGKENSTDYLYPEQLKMTVVKLISHRECQQPHYYGSEVTTKMLCAADPQWKTDSCQGDSGGPLVCSLQGRMTLTGIVSWGRGCALKDKPGVYTRVSHFLPWIRSHTKEENGLAL

SEQ ID NO: 262 - protein, 1253 aa, Homo sapiens
PMSTTVNVDSLAEYEKSQIKRALELGTVMTVFSFRKSTPERRTVQVIMETRQVAWSKTADKIEGFLDIMEIKEIRPGKNSKDFERAKAVRQKEDCCFTILYGTQFVLSTLSLAADSKEDAVNWLSGLKILHQEAMNASTPTIIESWLRKQIYSVDQTRRNSISLRELKTILPLINFKVSSAKFLKDKFVEIGAHKDELSFEQFHLFYKKLMFEQQKSILDEFKKDSSVFILGNTDRPDASAVYLHDFQRFLIHEQQEHWAQDLNKVRERMTKFIDDTMRETAEPFLFVDEFLTYLFSRENSIWDEKYDAVDMQDMNNPLSHYWISSSHNTYLTGDQLRSESSPEAYIRCLRMGCRCIELDCWDGPDGKPVIYHGWTRTTKIKFDDVVQAIKDHAFVTSSFPVILSIEEHCSVEQQRHMAKAFKEVFGDLLLTKPTEASADQLPSPSQLREKIIIKHKKLGPRGDVDVNMEDKKDEHKQQGELYMWDSIDQKWTRHYCAIADAKLSFSDDIEQTMEEEVPQDIPPTELHFGEKWFHKKVEKRTSAEKLLQEYCMETGGKDGTFLVRESETFPNDYTLSFWRSGRVQHCRIRSTMEGGTLKYYLTDNLRFRRMYALIQHYRETHLPCAEFELRLTDPVPNPNPHESKPWYYDSLSRGEAEDMLMRIPRDGAFLIRKREGSDSYAITFRARGKVKHCRINRDGRHFVLGTSAYFESLVELVSYYEKHSLYRKMRLRYPVTPELLERYNTERDINSLYDVSRMYVDPSEINPSMPQRTVKALYDYKAKRSDELSFCRGALIHNVSKEPGGWWKGDYGTRIQQYFPSNYVEDISTADFEELEKQIIEDNPLGSLCRGILDLNTYNVVKAPQGKNQKSFVFILEPKEQGDPPVEFATDRVEELFEWFQSIREITWKIDSKENNMKYWEKNQSIAIELSDLVVYCKPTSKTKDNLENPDFREIRSFVETKADSIIRQKPVDLLKYNQKGLTRVYPKGQRVDSSNYDPFRLWLCGSQMVALNFQTADKYMQMNHALFSLNGRTGYVLQPESMRTEKYDPMPPESQRKILMTLTVKVLGARHLPKLGRSIACPFVEVEICGAEYGNNKFKTTVVNDNGLSPIWAPTQEKVTFEIYDPNLAFLRFVVYEEDMFSDPNFLAHATYPIKAVKSGFRSVPLKNGYSEDIELASLLVFCEMRPVLESEEELYSSCRQLRRRQEELNNQLFLYDTHQNLRNANRDALVKEFSVNENHSSCTRRNATRG

SEQ ID NO: 263 - protein, 518 aa, Homo sapiens
PMARMGLAGAAGRWWGLALGLTAFFLPGVHSQVVQVNDSMYGFIGTDVVLHCSFANPLPSVKITQVTWQKSTNGSKQNVAIYNPSMGVSVLAPYRERVEFLRPSFTDGTIRLSRLELEDEGVYICEFATFPTGNRESQLNLTVMAKPTNWIEGTQAVLRAKKGQDDKVLVATCTSANGKPPSVVSWETRLKGEAEYQEIRNPNGTVTVISRYRLVPSREAHQQSLACIVNYHMDRFKESLTLNVQYEPEVTIEGFDGNWYLQRMDVKLTCKADANPPATEYHWTTLNGSLPKGVEAQNRTLFFKGPINYSLAGTYICEATNPIGTRSGQVEVNITEFPYTPSPPEHGRRAGPVPTAIIGGVAGSILLVLIVVGGIVVALRRRRHTFKGDYSTKKHVYGNGYSKAGIPQHHPPMAQNLQYPDDSDDEKKAGPLGGSSYEEEEEEEEGGGGGERKVGGPHPKYDEDAKRPYFTVDEAEARQDGYGDRTLGYQYDPEQLDLAENMVSQNDGSFISKKEWYV

SEQ ID NO: 264 - protein, 408 aa, Homo sapiens
PMLLSVTSRPGISTFGYNRNNKKPYVSLAQQMAPPSPSNSTPNSSSGSNGNDQLSKTNLYIRGLQPGTTDQDLVKLCQPYGKIVSTKAILDKTTNKCKGYGFVDFDSPSAAQKAVTALKASGVQAQMAKQQEQDPTNLYISNLPLSMDEQELEGMLKPFGQVISTRILRDTSGTSRGVGFARMESTEKCEAIITHFNGKYIKTPPGVPAPSDPLLCKFADGGPKKRQNQGKFVQNGRAWPRNADMGVMALTYDPTTALQNGFYPAPYNITPNRMLAQSALSPYLSSPVSSYQRVTQTSPLQVPNPSWMHHHSYLMQPSGSVLTPGMDHPISLQPASMMGPLTQQLGHLSLSSTGTYMPTAAAMQGAYISQYTPVPSSSVSVEESSGQQNQVAVDAPSEHGVYSFQFNK

SEQ ID NO: 265 - protein, 136 aa, Homo sapiens
PMPVDFTGYWKMLVNENFEEYLRALDVNVALRKIANLLKPDKEIVQDGDHMIIRTLSTFRNYIMDFQVGKEFEEDLTGIDDRKCMTTVSWDGDKLQCVQKGEKEGRGWTQWIEGDELHLEMRVEGVVCKQVFKKVQ

SEQ ID NO: 266 - protein, 148 aa, Homo sapiens
PMALQRTHSLLLLLLLTLLGLGLVQPSYGQDGMYQRFLRQHVHPEETGGSDRYCNLMMQRRKMTLYHCKRFNTFIHEDIWNIRSICSTTNIQCKNGKMNCHEGVVKVTDCRDTGSSRAPNCRYRAIASTRRVVIACEGNPQVPVHFDG

SEQ ID NO: 267 - protein, 249 aa, Homo sapiens
PMQTCPLAFPGHVSQALGTLLFLAASLSAQNEGWDSPICTEGVVSVSWGENTVMSCNISNAFSHVNIKLRAHGQESAIFNEVAPGYFSRDGWQLQVQGGVAQLVIKGARDSHAGLYMWHLVGHQRNNRQVTLEVSGAEPQSAPDTGFWPVPAVVTAVFILLVALVMFAWYRCRCSQQRREKKFFLLEPQMKVAALRAGAQQGLSRASAELWTPDSEPTPRPLALVFKPSPLGALELLSPQPLFPYAADP

SEQ ID NO: 268 - protein, 315 aa, Homo sapiens
PMGIGRSEGGRRGAALGVLLALGAALLAVGSASEYDYVSFQSDIGPYQSGRFYTKPPQCVDIPADLRLCHNVGYKKMVLPNLLEHETMAEVKQQASSWVPLLNKNCHAGTQVFLCSLFAPVCLDRPIYPCRWLCEAVRDSCEPVMQFFGFYWPEMLKCDKFPEGDVCIAMTPPNATEASKPQGTTVCPPCDNELKSEAIIEHLCASEFALRMKIKEVKKENGDKKIVPKKKKPLKLGPIKKKDLKKLVLYLKNGADCPCHQLDNLSHHFLIMGRKVKSQYLLTAIHKWDKKNKEFKNFMKKMKNHECPTFQSVFK

SEQ ID NO: 269 - protein, 347 aa, Homo sapiens
PMFLSILVALCLWLHLALGVRGAPCEAVRIPMCRHMPWNITRMPNHLHHSTQENAILAIEQYEELVDVNCSAVLRFFFCAMYAPICTLEFLHDPIKPCKSVCQRARDDCEPLMKMYNHSWPESLACDELPVYDRGVCISPEAIVTDLPEDVKWIDITPDMMVQERPLDVDCKRLSPDRCKCKKVKPTLATYLSKNYSYVIHAKIKAVQRSGCNEVTTVVDVKEIFKSSSPIPRTQVPLITNSSCQCPHILPHQDVLIMCYEWRSRMMLLENCLVEKWRDQLSKRSIQWEERLQEQRRTVQDKKKTAGRTSRSNPPKPKGKPPAPKPASPKKNIKTRSAQKRTNPKRV

SEQ ID NO: 270 - protein, 2365 aa, Homo sapiens
PMTTTVATDYDNIEIQQQYSDVNNRWDVDDWDNENSSARLFERSRIKALADEREAVQKKTFTKWVNSHLARVSCRITDLYTDLRDGRMLIKLLEVLSGERLPKPTKGRMRIHCLENVDKALQFLKEQRVHLENMGSHDIVDGNHRLTLGLIWTIILRFQIQDISVETEDNKEKKSAKDALLLWCQMKTAGYPNVNIHNFTTSWRDGMAFNALIHKHRPDLIDFDKLKKSNAHYNLQNAFNLAEQHLGLTKLLDPEDISVDHPDEKSIITYVVTYYHYFSKMKALAVEGKRIGKVLDNAIETEKMIEKYESLASDLLEWIEQTIIILNNRKFANSLVGVQQQLQAFNTYRTVEKPPKFTEKGNLEVLLFTIQSKMRANNQKVYMPREGKLISDINKAWERLEKAEHERELALRNELIRQEKLEQLARRFDRKAAMRETWLSENQRLVSQDNFGFDLPAVEAATKKHEAIETDIAAYEERVQAVVAVARELEAENYHDIKRITARKDNVIRLWEYLLELLRARRQRLEMNLGLQKIFQEMLYIMDWMDEMKVLVLSQDYGKHLLGVEDLLQKHTLVEADIGIQAERVRGVNASAQKFATDGEGYKPCDPQVIRDRVAHMEFCYQELCQLAAERRARLEESRRLWKFFWEMAEEEGWIREKEKILSSDDYGKDLTSVMRLLSKHRAFEDEMSGRSGHFEQAIKEGEDMIAEEHFGSEKIRERIIYIREQWANLEQLSAIRKKRLEEASLLHQFQADADDIDAWMLDILKIVSSSDVGHDEYSTQSLVKKHKDVAEEIANYRPTLDTLHEQASALPQEHAESPDVRGRLSGIEERYKEVAELTRLRKQALQDTLALYKMFSEADACELWIDEKEQWLNNMQIPEKLEDLEVIQHRFESLEPEMNNQASRVAVVNQIARQLMHSGHPSEKEIKAQQDKLNTRWSQFRELVDRKKDALLSALSIQNYHLECNETKSWIREKTKVIESTQDLGNDLAGVMALQRKLTGMERDLVAIEAKLSDLQKEAEKLESEHPDQAQAILSRLAEISDVWEEMKTTLKNREASLGEASKLQQFLRDLDDFQSWLSRTQTAIASEDMPNTLTEAEKLLTQHENIKNEIDNYEEDYQKMRDMGEMVTQGQTDAQYMFLRQRLQALDTGWNELHKMWENRQNLLSQSHAYQQFLRDTKQAEAFLNNQEYVLAHTEMPTTLEGAEAAIKKQEDFMTTMDANEEKINAVVETGRRLVSDGNINSDRIQEKVDSIDDRHRKNRETASELLMRLKDNRDLQKFLQDCQELSLWINEKMLTAQDMSYDEARNLHSKWLKHQAFMAELASNKEWLDKIEKEGMQLISEKPETEAVVKEKLTGLHKMWEVLESTTQTKAQRLFDANKAELFTQSCADLDKWLHGLESQIQSDDYGKHLTSVNILLKKQQMLENQMEVRKKEIEELQSQAQALSQEGKSTDEVDSKRLTVQTKFMELLEPLNERKHNLLASKEIHQFNRDVEDEILWVGERMPLATSTDHGHNLQTVQLLIKKNQTLQKEIQGHQPRIDDIFERSQNIVTDSSSLSAEAIRQRLADLKQLWGLLIEETEKRHRRLEEAHRAQQYYFDAAEAEAWMSEQELYMMSEEKAKDEQSAVSMLKKHQILEQAVEDYAETVHQLSKTSRALVADSHPESERISMRQSKVDKLYAGLKDLAEERRGKLDERHRLFQLNREVDDLEQWIAEREVVAGSHELGQDYEHVTMLQERFREFARDTGNIGQERVDTVNHLADELINSGHSDAATIAEWKDGLNEAWADLLELIDTRTQILAASYELHKFYHDAKEIFGRIQDKHKKLPEELGRDQNTVETLQRMHTTFEHDIQALGTQVRQLQEDAARLQAAYAGDKADDIQKRENEVLEAWKSLLDACESRRVRLVDTGDKFRFFSMVRDLMLWMEDVIRQIEAQEKPRDVSSVELLMNNHQGIKAEIDARNDSFTTCIELGKSLLARKHYASEEIKEKLLQLTEKRKEMIDKWEDRWEWLRLILEVHQFSRDASVAEAWLLGQEPYLSSREIGQSVDEVEKLIKRHEAFEKSAATWDERFSALERLTTLELLEVRRQQEEEERKRRPPSPEPSTKVSEEAESQQQWDTSKGEQVSQNGLPAEQGSPRMAETVDTSEMVNGATEQRTSSKESSPIPSPTSDRKAKTALPAQSAATLPARTQETPSAQMEGFLNRKHEWEAHNKKASSRSWHNVYCVINNQEMGFYKDAKTAASGIPYHSEVPVSLKEAVCEVALDYKKKKHVFKLRLNDGNEYLFQAKDDEEMNTWIQAISSAISSDKHEVSASTQSTPASSRAQTLPTSVVTITSESSPGKREKDKEKDKEKRFSLFGKKK

SEQ ID NO: 271 - protein, 438 aa, Homo sapiens
PMLWKLTDNIKYEDCEDRHDGTSNGTARLPQLGTVGQSPYTSAPPLSHTPNADFQPPYFPPPYQPIYPQSQDPYSHVNDPYSLNPLHAQPQPQHPGWPGQRQSQESGLLHTHRGLPHQLSGLDPRRDYRRHEDLLHGPHALSSGLGDLSIHSLPHAIEEVPHVEDPGINIPDQTVIKKGPVSLSKSNSNAVSAIPINKDNLFGGVVNPNEVFCSVPGRLSLLSSTSKYKVTVAEVQRRLSPPECLNASLLGGVLRRAKSKNGGRSLREKLDKIGLNLPAGRRKAANVTLLTSLVEGEAVHLARDFGYVCETEFPAKAVAEFLNRQHSDPNEQVTRKNMLLATKQICKEFTDLLAQDRSPLGNSRPNPILEPGIQSCLTHFNLISHGFGSPAVCAAVTALQNYLTEALKAMDKMYLSNNPNSHTDNNAKSSDKEEKHRK

SEQ ID NO: 272 - protein, 159 aa, Homo sapiens
PMSGIALSRLAQERKAWRKDHPFGFVAVPTKNPDGTMNLMNWECAIPGKKGTPWEGGLFKLRMLFKDDYPSSPPKCKFEPPLFHPNVYPSGTVCLSILEEDKDWRPAITIKQILLGIQELLNEPNIQDPAQAEAYTIYCQNRVEYEKRVRAQAKKFAPS

SEQ ID NO: 273 - protein, 495 aa, Homo sapiens
PMFEIKKICCIGAGYVGGPTCSVIAHMCPEIRVTVVDVNESRINAWNSPTLPIYEPGLKEVVESCRGKNLFFSTNIDDAIKEADLVFISVNTPTKTYGMGKGRAADLKYIEACARRIVQNSNGYKIVTEKSTVPVRAAESIRRIFDANTKPNLNLQVLSNPEFLAEGTAIKDLKNPDRVLIGGDETPEGQRAVQALCAVYEHWVPREKILTTNTWSSELSKLAANAFLAQRISSINSISALCEATGADVEEVATAIGMDQRIGNKFLKASVGFGGSCFQKDVLNLVYLCEALNLPEVARYWQQVIDMNDYQRRRFASRIIDSLFNTVTDKKIAILGFAFKKDTGDTRESSSIYISKYLMDEGAHLHIYDPKVPREQIVVDLSHPGVSEDDQVSRLVTISKDPYEACDGAHAVVICTEWDMFKELDYERIHKKMLKPAFIFDGRRVLDGLHNELQTIGFQIETIGKKVSSKRIPYAPSGEIPKFSLQDPPNKKPKV

SEQ ID NO: 274 - protein, 616 aa, Homo sapiens
PMKALRLSASALFCLLLINGLGAAPPGRPEAQPPPLSSEHKEPVAGDAVPGPKDGSAPEVRGARNSEPQDEGELFQGVDPRALAAVLLQALDRPASPPAPSGSQQGPEEEAAEALLTETVRSQTHSLPAPESPEPAAPPRPQTPENGPEASDPSEELEALASLLQELRDFSPSSAKRQQETAAAETETRTHTLTRVNLESPGPERVWRASWGEFQARVPERAPLPPPAPSQFQARMPDSGPLPETHKFGEGVSSPKTHLGEALAPLSKAYQGVAAPFPKARRPESALLGGSEAGERLLQQGLAQVEAGRRQAEATRQAAAQEERLADLASDLLLQYLLQGGARQRGLGGRGLQEAAEERESAREEEEAEQERRGGEERVGEEDEEAAEAEAEAEEAERARQNALLFAEEEDGEAGAEDKRSQEETPGHRRKEAEGTEEGGEEEDDEEMDPQTIDSLIELSTKLHLPADDVVSIIEEVEEKRKRKKNAPPEPVPPPRAAPAPTHVRSPQPPPPAPAPARDELPDWNEVLPPWDREEDEVYPPGPYHPFPNYIRPRTLQPPSALRRRHYHHALPPSRHYPGREAQARRAQEEAEAEERRLQEQEELENYIEHVLLRRP

SEQ ID NO: 275 - protein, 1072 aa, Homo sapiens
PMPAIMTMLADHAARQLLDFSQKLDINLLDNVVNCLYHGEGAQQRMAQEVLTHLKEHPDAWTRVDTILEFSQNMNTKYYGLQILENVIKTRWKILPRNQCEGIKKYVVGLIIKTSSDPTCVEKEKVYIGKLNMILVQILKQEWPKHWPTFISDIVGASRTSESLCQNNMVILKLLSEEVFDFSSGQITQVKSKHLKDSMCNEFSQIFQLCQFVMENSQNAPLVHATLETLLRFLNWIPLGYIFETKLISTLIYKFLNVPMFRNVSLKCLTEIAGVSVSQYEEQFVTLFTLTMMQLKQMLPLNTNIRLAYSNGKDDEQNFIQNLSLFLCTFLKEHDQLIEKRLNLRETLMEALHYMLLVSEVEETEIFKICLEYWNHLAAELYRESPFSTSASPLLSGSQHFDVPPRRQLYLPMLFKVRLLMVSRMAKPEEVLVVENDQGEVVREFMKDTDSINLYKNMRETLVYLTHLDYVDTERIMTEKLHNQVNGTEWSWKNLNTLCWAIGSISGAMHEEDEKRFLVTVIKDLLGLCEQKRGKDNKAIIASNIMYIVGQYPRFLRAHWKFLKTVVNKLFEFMHETHDGVQDMACDTFIKIAQKCRRHFVQVQVGEVMPFIDEILNNINTIICDLQPQQVHTFYEAVGYMIGAQTDQTVQEHLIEKYMLLPNQVWDSIIQQATKNVDILKDPETVKQLGSILKTNVRACKAVGHPFVIQLGRIYLDMLNVYKCLSENISAAIQANGEMVTKQPLIRSMRTVKRETLKLISGWVSRSNDPQMVAENFVPPLLDAVLIDYQRNVPAAREPEVLSTMAIIVNKLGGHITAEIPQIFDAVFECTLNMINKDFEEYPEHRTNFFLLLQAVNSHCFPAFLAIPPTQFKLVLDSIIWAFKHTMRNVADTGLQILFTLLQNVAQEEAAAQSFYQTYFCDILQHIFSVVTDTSHTAGLTMHASILAYMFNLVEEGKISTSLNPGNPVNNQIFLQEYVANLLKSAFPHLQDAQVKLFVTGLFSLNQDIPAFKEHLRDFLVQIKEFAGEDTSDLFLEEREIALRQADEEKHKRQMSVPGIFNPHEIPEEMCD

SEQ ID NO: 276 - protein, 1378 aa, Homo sapiens
PMDTSSVGGLELTDQTPVLLGSTAMATSLTNVGNSFSGPANPLVSRSNKFQNSSVEDDDDVVFIEPVQPPPPSVPVVADQRTITFTSSKNEELQGNDSKITPSSKELASQKGSVSETIVIDDEEDMETNQGQEKNSSNFIERRPPETKNRTNDVDFSTSSFSRSKVNAGMGNSGITTEPDSEIQIANVTTLETGVSSVNDGQLENTDGRDMNLMITHVTSLQNTNLGDVSNGLQSSNFGVNIQTYTPSLTSQTKTGVGPFNPGRMNVAGDVFQNGESATHHNPDSWISQSASFPRNQKQPGVDSLSPVASLPKQIFQPSVQQQPTKPVKVTCANCKKPLQKGQTAYQRKGSAHLFCSTTCLSSFSHKPAPKKLCVMCKKDITTMKGTIVAQVDSSESFQEFCSTSCLSLYEDKQNPTKGALNKSRCTICGKLTEIRHEVSFKNMTHKLCSDHCFNRYRMANGLIMNCCEQCGEYLPSKGAGNNVLVIDGQQKRFCCQSCVSEYKQVGSHPSFLKEVRDHMQDSFLMQPEKYGKLTTCTGCRTQCRFFDMTQCIGPNGYMEPYCSTACMNSHKTKYAKSQSLGIICHFCKRNSLPQYQATMPDGKLYNFCNSSCVAKFQALSMQSSPNGQFVAPSDIQLKCNYCKNSFCSKPEILEWENKVHQFCSKTCSDDYKKLHCIVTYCEYCQEEKTLHETVNFSGVKRPFCSEGCKLLYKQDFARRLGLRCVTCNYCSQLCKKGATKELDGVVRDFCSEDCCKKFQDWYYKAARCDCCKSQGTLKERVQWRGEMKHFCDQHCLLRFYCQQNEPNMTTQKGPENLHYDQGCQTSRTKMTGSAPPPSPTPNKEMKNKAVLCKPLTMTKATYCKPHMQTKSCQTDDTWRTEYVPVPIPVPVYIPVPMHMYSQNIPVPTTVPVPVPVPVFLPAPLDSSEKIPAAIEELKSKVSSDALDTELLTMTDMMSEDEGKTETTNINSVIIETDIIGSDLLKNSDPETQSSMPDVPYEPDLDIEIDFPRAAEELDMENEFLLPPVFGEEYEEQPRPRSKKKGAKRKAVSGYQSHDDSSDNSECSFPFKYTYGVNAWKHWVKTRQLDEDLLVLDELKSSKSVKLKEDLLSHTTAELNYGLAHFVNEIRRPNGENYAPDSIYYLCLGIQEYLCGSNRKDNIFIDPGYQTFEQELNKILRSWQPSILPDGSIFSRVEEDYLWRIKQLGSHSPVALLNTLFYFNTKYFGLKTVEQHLRLSFGTVFRHWKKNPLTMENKACLRYQVSSLCGTDNEDKITTGKRKHEDDEPVFEQIENTANPSRCPVKMFECYLSKSPQNLNQRMDVFYLQPECSSSTDSPVWYTSTSLDRNTLENMLVRVLLVKDIYDKDNYELDEDTD

SEQ ID NO: 277 - protein, 513 aa, Homo sapiens
PMHTPDFAGPDDARAVDIMDICESILERKRHDSERSTCSILEQTDMEAVEALVCMSSWGQRSQKGDLLRIRPLTPVSDSGDVTTTVHMDAATPELPKDFHSLSTLCITPPQSPDLVEPSTRTPVSPQVTDSKACTATDVLQSSAVVARALSGGAERGLLGLEPVPSSPCRAKGTSVIRHTGESPAACFPTIQTPDCRLSDSREGEEQLLGHFETLQDTHLTDSLLSTNLVSCQPCLHKSGGLLLTDKGQQAGWPGAVQTCSPKNYENDLPRKTTPLISVSVPAPPVLCQMIPVTGQSSMLPAFLKPPPQLSVGTVRPILAQAAPAPQPVFVGPAVPQGAVMLVLPQGALPPPAPCAANVMAAGNTKLLPLAPAPVFITSSQNCVPQVDFSRRRNYVCSFPGCRKTYFKSSHLKAHLRTHTGEKPFNCSWDGCDKKFARSDELSRHRRTHTGEKKFVCPVCDRRFMRSDHLTKHARRHMTTKKIPGWQAEVGKLNRIASAESPGSPLVSMPASA

SEQ ID NO: 278 - protein, 525 aa, Homo sapiens
PMHVETGPNGEQIRKHAGQKRTYKAISESYAFLPREAVTRFLMSCSECQKRMHLNPDGTDHKDNGKPPTLVTSMIDYNMPITMAYMKHMKLQLLNSQQDEDESSIESDEFDMSDSTRMSAVNSDLSSNLEERMQSPQNLHGQQDDDSAAESFNGNETLGHSSIASGGTHSREMGDSNSDGKTGLEQDEQPLNLSDSPLSAQLTSEYRIDDHNSNGKNKYKNLLISDLKMEREARENGSKSPAHSYSSYDSGKNESVDRGAEDLSLNRGDEDEDDHEDHDDSEKVNETDGVEAERLKAFNMFVRLFVDENLDRMVPISKQPKEKIQAIIDSCRRQFPEYQERARKRIRTYLKSCRRMKRSGFEMSRPIPSHLTSAVAESILASACESESRNAAKRMRLERQQDESAPADKQCKPEATQATYSTSAVPGSQDVLYINGNGTYSYHSYRGLGGGLLNLNDASSSGPTDLSMKRQLATSSGSSSSSNSRPQLSPTEINAVRQLVAGYRESAAFLLRSADELENLILQQN

SEQ ID NO: 279 - protein, 193 aa, Homo sapiens
PMAAWGRRRLGPGSSGGSARERVSLSATDCYIVHEIYNGENAQDQFEYELEQALEAQYKYIVIEPTRIGDETARWITVGNCLHKTAVLAGTACLFTPLALPLDYSHYISLPAGVLSLACCTLYGISWQFDPCCKYQVEYDAYKLSRLPLHTLTSSTPVVLVRKDDLHRKRLHNTIALAALVYCVKKIYELYAV

SEQ ID NO: 280 - protein, 363 aa, Homo sapiens
PMRRPSLLLKDILKCTLLVFGVWILYILKLNYTTEECDMKKMHYVDPDHVKRAQKYAQQVLQKECRPKFAKTSMALLFEHRYSVDLLPFVQKAPKDSEAESKYDPPFGFRKFSSKVQTLLELLPEHDLPEHLKAKTCRRCVVIGSGGILHGLELGHTLNQFDVVIRLNSAPVEGYSEHVGNKTTIRMTYPEGAPLSDLEYYSNDLFVAVLFKSVDFNWLQAMVKKETLPFWVRLFFWKQVAEKIPLQPKHFRILNPVIIKETAFDILQYSEPQSRFWGRDKNVPTIGVIAVVLATHLCDEVSLAGFGYDLNQPRTPLHYFDSQCMAAMNFQTMHNVTTETKFLLKLVKEGVVKDLSGGIDREF

SEQ ID NO: 281 - protein, 466 aa, Homo sapiens
PMETGFPAIMYPGSFIGGWGEEYLSWEGPGLPDFVFQQQPVESEAMHCSNPKSGVVLATVARGPDACQILTRAPLGQDPPQRTVLGLLTANGQYRRTCGQGITRIRCYSGSENAFPPAGKKALPDCGVQEPPKQGFDIYMDELEQGDRDSCSVREGMAFEDVYEVDTGTLKSDLHFLLDFNTVSPMLVDSSLLSQSEDISSLGTDVINVTEYAEEIYQYLREAEIRHRPKAHYMKKQPDITEGMRTILVDWLVEVGEEYKLRAETLYLAVNFLDRFLSCMSVLRGKLQLVGTAAMLLASKYEEIYPPEVDEFVYITDDTYTKRQLLKMEHLLLKVLAFDLTVPTTNQFLLQYLRRQGVCVRTENLAKYVAELSLLEADPFLKYLPSLIAAAAFCLANYTVNKHFWPETLAAFTGYSLSEIVPCLSELHKAYLDIPHRPQQAIREKYKASKYLCVSLMEPPAVLLLQ

SEQ ID NO: 282 - protein, 980 aa, Homo sapiens
PMALFAVFQTTFFLTLLSLRTYQSEVLAERLPLTPVSLKVSTNSTRQSLHLQWTVHNLPYHQELKMVFQIQISRIETSNVIWVGNYSTTVKWNQVLHWSWESELPLECATHFVRIKSLVDDAKFPEPNFWSNWSSWEEVSVQDSTGQDILFVFPKDKLVEEGTNVTICYVSRNIQNNVSCYLEGKQIHGEQLDPHVTAFNLNSVPFIRNKGTNIYCEASQGNVSEGMKGIVLFVSKVLEEPKDFSCETEDFKTLHCTWDPGTDTALGWSKQPSQSYTLFESFSGEKKLCTHKNWCNWQITQDSQETYNFTLIAENYLRKRSVNILFNLTHRVYLMNPFSVNFENVNATNAIMTWKVHSIRNNFTYLCQIELHGEGKMMQYNVSIKVNGEYFLSELEPATEYMARVRCADASHFWKWSEWSGQNFTTLEAAPSEAPDVWRIVSLEPGNHTVTLFWKPLSKLHANGKILFYNVVVENLDKPSSSELHSIPAPANSTKLILDRCSYQICVIANNSVGASPASVIVISADPENKEVEEERIAGTEGGFSLSWKPQPGDVIGYVVDWCDHTQDVLGDFQWKNVGPNTTSTVISTDAFRPGVRYDFRIYGLSTKRIACLLEKKTGYSQELAPSDNPHVLVDTLTSHSFTLSWKDYSTESQPGFIQGYHVYLKSKARQCHPRFEKAVLSDGSECCKYKIDNPEEKALIVDNLKPESFYEFFITPFTSAGEGPSATFTKVTTPDEHSSMLIHILLPMVFCVLLIMVMCYLKSQWIKETCYPDIPDPYKSSILSLIKFKENPHLIIMNVSDCIPDAIEVVSKPEGTKIQFLGTRKSLTETELTKPNYLYLLPTEKNHSGPGPCICFENLTYNQAASDSGSCGHVPVSPKAPSMLGLMTSPENVLKALEKNYMNSLGEIPAGETSLNYVSQLASPMFGDKDSLPTNPVEAPHCSEYKMQMAVSLRLALPPPTENSSLSSITLLDPGEHYC

SEQ ID NO: 283 - protein, 197 aa, Homo sapiens
PMAAIRKKLVVVGDGACGKTCLLIVFSKDEFPEVYVPTVFENYVADIEVDGKQVELALWDTAGQEDYDRLRPLSYPDTDVILMCFSVDSPDSLENIPEKWVPEVKHFCPNVPIILVANKKDLRSDEHVRTELARMKQEPVRTDDGRAMAVRIQAYDYLECSAKTKEGVREVFETATRAALQKRYGSQNGCINCCKVL

SEQ ID NO: 284 - protein, 194 aa, Homo sapiens
PMPNWGGGKKCGVCQKTVYFAEEVQCEGNSFHKSCFLCMVCKKNLDSTTVAVHGEEIYCKSCYGKKYGPKGYGYGQGAGTLSTDKGESLGIKHEEAPGHRPTTNPNASKFAQKIGGSERCPRCSQAVYAAEKVIGAGKSWHKACFRCAKCGKGLESTTLADKDGEIYCKGCYAKNFGPKGFGFGQGAGALVHSE

SEQ ID NO: 285 - protein, 630 aa, Homo sapiens
PMVLCPVIGKLLHKRVVLASASPRRQEILSNAGLRFEVVPSKFKEKLDKASFATPYGYAMETAKQKALEVANRLYQKDLRAPDVVIGADTIVTVGGLILEKPVDKQDAYRMLSRLSGREHSVFTGVAIVHCSSKDHQLDTRVSEFYEETKVKFSELSEELLWEYVHSGEPMDKAGGYGIQALGGMLVESVHGDFLNVVGFPLNHFCKQLVKLYYPPRPEDLRRSVKHDSIPAADTFEDLSDVEGGGSEPTQRDAGSRDEKAEAGEAGQATAEAECHRTRETLPPFPTRLLELIEGFMLSKGLLTACKLKVFDLLKDEAPQKAADIASKVDASACGMERLLDICAAMGLLEKTEQGYSNTETANVYLASDGEYSLHGFIMHNNDLTWNLFTYLEFAIREGTNQHHRALGKKAEDLFQDAYYQSPETRLRFMRAMHGMTKLTACQVATAFNLSRFSSACDVGGCTGALARELAREYPRMQVTVFDLPDIIELAAHFQPPGPQAVQIHFAAGDFFRDPLPSAELYVLCRILHDWPDDKVHKLLSKVAESCKPGAGLLLVETLLDEEKRVAQRALMQSLNMLVQTEGKERSLGEYQCLLELHGFHQVQVVHLGGVLDAILPPKWPPEAQAACSL

SEQ ID NO: 286 - protein, 359 aa, Homo sapiens
PMSADAAAGAPLPRLCCLEKGPNGYGFHLHGEKGKLGQYIRLVEPGSPAEKAGLLAGDRLVEVNGENVEKETHQQVVSRIRAALNAVRLLVVDPETDEQLQKLGVQVREELLRAQEAPGQAEPPAAAEVQGAGNENEPREADKSHPEQRELRPRLCTMKKGPSGYGFNLHSDKSKPGQFIRSVDPDSPAEASGLRAQDRIVEVNGVCMEGKQHGDVVSAIRAGGDETKLLVVDRETDEFFKKCRVIPSQEHLNGPLPVPFTNGEIQKENSREALAEAALESPRPALVRSASSDTSEELNSQDSPPKQDSTAPSSTSSSDPILDFNISLAMAKERAHQKRSSKRAPQMDWSKKNELFSNL

SEQ ID NO: 287 - protein, 1691 aa, Homo sapiens
PMAGASVKVAVRVRPFNSREMSRDSKCIIQMSGSTTTIVNPKQPKETPKSFSFDYSYWSHTSPEDINYASQKQVYRDIGEEMLQHAFEGYNVCIFAYGQTGAGKSYTMMGKQEKDQQGIIPQLCEDLFSRINDTTNDNMSYSVEVSYMEIYCERVRDLLNPKNKGNLRVREHPLLGPYVEDLSKLAVTSYNDIQDLMDSGNKARTVAATNMNETSSRSHAVFNIIFTQKRHDAETNITTEKVSKISLVDLAGSERADSTGAKGTRLKEGANINKSLTTLGKVISALAEMDSGPNKNKKKKKTDFIPYRDSVLTWLLRENLGGNSRTAMVAALSPADINYDETLSTLRYADRAKQIRCNAVINEDPNNKLIRELKDEVTRLRDLLYAQGLGDITDMTNALVGMSPSSSLSALSSRAASVSSLHERILFAPGSEEAIERLKETEKIIAELNETWEEKLRRTEAIRMEREALLAEMGVAMREDGGTLGVFSPKKTPHLVNLNEDPLMSECLLYYIKDGITRVGREDGERRQDIVLSGHFIKEEHCVFRSDSRGGSEAVVTLEPCEGADTYVNGKKVTEPSILRSGNRIIMGKSHVFRFNHPEQARQERERTPCAETPAEPVDWAFAQRELLEKQGIDMKQEMEQRLQELEDQYRREREEATYLLEQQRLDYESKLEALQKQMDSRYYPEVNEEEEEPEDEVQWTERECELALWAFRKWKWYQFTSLRDLLWGNAIFLKEANAISVELKKKVQFQFVLLTDTLYSPLPPDLLPPEAAKDRETRPFPRTIVAVEVQDQKNGATHYWTLEKLRQRLDLMREMYDRAAEVPSSVIEDCDNVVTGGDPFYDRFPWFRLVGRAFVYLSNLLYPVPLVHRVAIVSEKGEVKGFLRVAVQAISADEEAPDYGSGVRQSGTAKISFDDQHFEKFQSESCPVVGMSRSGTSQEELRIVEGQGQGADVGPSADEVNNNTCSAVPPEGLLLDSSEKAALDGPLDAALDHLRLGNTFTFRVTVLQASSISAEYADIFCQFNFIHRHDEAFSTEPLKNTGRGPPLGFYHVQNIAVEVTKSFIEYIKSQPIVFEVFGHYQQHPFPPLCKDVLSPLRPSRRHFPRVMPLSKPVPATKLSTLTRPCPGPCHCKYDLLVYFEICELEANGDYIPAVVDHRGGMPCMGTFLLHQGIQRRITVTLLHETGSHIRWKEVRELVVGRIRNTPETDESLIDPNILSLNILSSGYIHPAQDDRTFYQFEAAWDSSMHNSLLLNRVTPYREKIYMTLSAYIEMENCTQPAVVTKDFCMVFYSRDAKLPASRSIRNLFGSGSLRASESNRVTGVYELSLCHVADAGSPGMQRRRRRVLDTSVAYVRGEENLAGWRPRSDSLILDHQWELEKLSLLQEVEKTRHYLLLREKLETAQRPVPEALSPAFSEDSESHGSSSASSPLSAEGRPSPLEAPNERQRELAVKCLRLLTHTFNREYTHSHVCVSASESKLSEMSVTLLRDPSMSPLGVATLTPSSTCPSLVEGRYGATDLRTPQPCSRPASPEPELLPEADSKKLPSPARATETDKEPQRLLVPDIQEIRVSPIVSKKGYLHFLEPHTSGWARRFVVVRRPYAYMYNSDKDTVERFVLNLATAQVEYSEDQQAMLKTPNTFAVCTEHRGILLQAASDKDMHDWLYAFNPLLAGTIRSKLSRRRSAQMRV

SEQ ID NO: 288 - protein, 346 aa, Homo sapiens
PMAQRGGARRPRGDRERLGSRLRALRPGREPRQSEPPAQRGPPPSRRPPARSTASGHDRPTRGAAAGARRPRMKKKTRRRSTRSEELTRSEELTLSEEATWSEEATQSEEATQGEEMNRSQEVTRDEESTRSEEVTREEMAAAGLTVTVTHSNEKHDLHVTSQQGSSEPVVQDLAQVVEEVIGVPQSFQKLIFKGKSLKEMETPLSALGIQDGCRVMLIGKKNSPQEEVELKKLKHLEKSVEKIADQLEELNKELTGIQQGFLPKDLQAEALCKLDRRVKATIEQFMKILEEIDTLILPENFKDSRLKRKGLVKKVQAFLAECDTVEQNICQETERLQSTNFALAE

SEQ ID NO: 289 - protein, 416 aa, Homo sapiens
PMRIPVDPSTSRRFTPPSPAFPCGGGGGKMGENSGALSAQAAVGPGGRARPEVRSMVDVLADHAGELVRTDSPNFLCSVLPSHWRCNKTLPVAFKVVALGDVPDGTVVTVMAGNDENYSAELRNASAVMKNQVARFNDLRFVGRSGRGKSFTLTITVFTNPTQVATYHRAIKVTVDGPREPRRHRQKLEDQTKPFPDRFGDLERLRMRVTPSTPSPRGSLSTTSHFSSQPQTPIQGTSELNPFSDPRQFDRSFPTLPTLTESRFPDPRMHYPGAMSAAFPYSATPSGTSISSLSVAGMPATSRFHHTYLPPPYPGAPQNQSGPFQANPSPYHLYYGTSSGSYQFSMVAGSSSGGDRSPTRMLASCTSSAASVAAGNLMNPSLGGQSDGVEADGSHSNSPTALSTPGRMDEAVWRPY

SEQ ID NO: 290 - protein, 883 aa, Homo sapiens
PMGPWSRSLSALLLLLQVSSWLCQEPEPCHPGFDAESYTFTVPRRHLERGRVLGRVNFEDCTGRQRTAYFSLDTRFKVGTDGVITVKRPLRFHNPQIHFLVYAWDSTYRKFSTKVTLNTVGHHHRPPPHQASVSGIQAELLTFPNSSPGLRRQKRDWVIPPISCPENEKGPFPKNLVQIKSNKDKEGKVFYSITGQGADTPPVGVFIIERETGWLKVTEPLDRERIATYTLFSHAVSSNGNAVEDPMEILITVTDQNDNKPEFTQEVFKGSVMEGALPGTSVMEVTATDADDDVNTYNAAIAYTILSQDPELPDKNMFTINRNTGVISVVTTGLDRESFPTYTLVVQAADLQGEGLSTTATAVITVTDTNDNPPIFNPTTYKGQVPENEANVVITTLKVTDADAPNTPAWEAVYTILNDDGGQFVVTTNPVNNDGILKTAKGLDFEAKQQYILHVAVTNVVPFEVSLTTSTATVTVDVLDVNEAPIFVPPEKRVEVSEDFGVGQEITSYTAQEPDTFMEQKITYRIWRDTANWLEINPDTGAISTRAELDREDFEHVKNSTYTALIIATDNGSPVATGTGTLLLILSDVNDNAPIPEPRTIFFCERNPKPQVINIIDADLPPNTSPFTAELTHGASANWTIQYNDPTQESIILKPKMALEVGDYKINLKLMDNQNKDQVTTLEVSVCDCEGAAGVCRKAQPVEAGLQIPAILGILGGILALLILILLLLLFLRRRAVVKEPLLPPEDDTRDNVYYYDEEGGGEEDQDFDLSQLHRGLDARPEVTRNDVAPTLMSVPRYLPRPANPDEIGNFIDENLKAADTDPTAPPYDSLLVFDYEGSGSEAASLSSLNSSESDKDQDYDYLNEWGNRFKKLADMYGGGEDD

SEQ ID NO: 291 - protein, 3397 aa, Homo sapiens
PMFINIKSILWMCSTLIVTHALHKVKVGKSPPVRGSLSGKVSLPCHFSTMPTLPPSYNTSEFLRIKWSKIEVDKNGKDLKETTVLVAQNGNIKIGQDYKGRVSVPTHPEAVGDASLTVVKLLASDAGLYRCDVMYGIEDTQDTVSLTVDGVVFHYRAATSRYTLNFEAAQKACLDVGAVIATPEQLFAAYEDGFEQCDAGWLADQTVRYPIRAPRVGCYGDKMGKAGVRTYGFRSPQETYDVYCYVDHLDGDVFHLTVPSKFTFEEAAKECENQDARLATVGELQAAWRNGFDQCDYGWLSDASVRHPVTVARAQCGGGLLGVRTLYRFENQTGFPPPDSRFDAYCFKPKEATTIDLSILAETASPSLSKEPQMVSDRTTPIIPLVDELPVIPTEFPPVGNIVSFEQKATVQPQAITDSLATKLPTPTGSTKKPWDMDDYSPSASGPLGKLDISEIKEEVLQSTTGVSHYATDSWDGVVEDKQTQESVTQIEQIEVGPLVTSMEILKHIPSKEFPVTETPLVTARMILESKTEKKMVSTVSELVTTGHYGFTLGEEDDEDRTLTVGSDESTLIFDQIPEVITVSKTSEDTIHTHLEDLESVSASTTVSPLIMPDNNGSSMDDWEERQTSGRITEEFLGKYLSTTPFPSQHRTEIELFPYSGDKILVEGISTVIYPSLQTEMTHRRERTETLIPEMRTDTYTDEIQEEITKSPFMGKTEEEVFSGMKLSTSLSEPIHVTESSVEMTKSFDFPTLITKLSAEPTEVRDMEEDFTATPGTTKYDENITTVLLAHGTLSVEAATVSKWSWDEDNTTSKPLESTEPSASSKLPPALLTTVGMNGKDKDIPSFTEDGADEFTLIPDSTQKQLEEVTDEDIAAHGKFTIRFQPTTSTGIAEKSTLRDSTTEEKVPPITSTEGQVYATMEGSALGEVEDVDLSKPVSTVPQFAHTSEVEGLAFVSYSSTQEPTTYVDSSHTIPLSVIPKTDWGVLVPSVPSEDEVLGEPSQDILVIDQTRLEATISPETMRTTKITEGTTQEEFPWKEQTAEKPVPALSSTAWTPKEAVTPLDEQEGDGSAYTVSEDELLTGSERVPVLETTPVGKIDHSVSYPPGAVTEHKVKTDEVVTLTPRIGPKVSLSPGPEQKYETEGSSTTGFTSSLSPFSTHITQLMEETTTEKTSLEDIDLGSGLFEKPKATELIEFSTIKVTVPSDITTAFSSVDRLHTTSAFKPSSAITKKPPLIDREPGEETTSDMVIIGESTSHVPPTTLEDIVAKETETDIDREYFTTSSPPATQPTRPPTVEDKEAFGPQALSTPQPPASTKFHPDINVYIIEVRENKTGRMSDLSVIGHPIDSESKEDEPCSEETDPVHDLMAEILPEFPDIIEIDLYHSEENEEEEEECANATDVTTTPSVQYINGKHLVTTVPKDPEAAEARRGQFESVAPSQNFSDSSESDTHPFVIAKTELSTAVQPNESTETTESLEVTWKPETYPETSEHFSGGEPDVFPTVPFHEEFESGTAKKGAESVTERDTEVGHQAHEHTEPVSLFPEESSGEIAIDQESQKIAFARATEVTFGEEVEKSTSVTYTPTIVPSSASAYVSEEEAVTLIGNPWPDDLLSTKESWVEATPRQVVELSGSSSIPITEGSGEAEEDEDTMFTMVTDLSQRNTTDTLITLDTSRIITESFFEVPATTIYPVSEQPSAKVVPTKFVSETDTSEWISSTTVEEKKRKEEEGTTGTASTFEVYSSTQRSDQLILPFELESPNVATSSDSGTRKSFMSLTTPTQSEREMTDSTPVFTETNTLENLGAQTTEHSSIHQPGVQEGLTTLPRSPASVFMEQGSGEAAADPETTTVSSFSLNVEYAIQAEKEVAGTLSPHVETTFSTEPTGLVLSTVMDRVVAENITQTSREIVISERLGEPNYGAEIRGFSTGFPLEEDFSGDFREYSTVSHPIAKEETVMMEGSGDAAFRDTQTSPSTVPTSVHISHISDSEGPSSTMVSTSAFPWEEFTSSAEGSGEQLVTVSSSVVPVLPSAVQKFSGTASSIIDEGLGEVGTVNEIDRRSTILPTAEVEGTKAPVEKEEVKVSGTVSTNFPQTIEPAKLWSRQEVNPVRQEIESETTSEEQIQEEKSFESPQNSPATEQTIFDSQTFTETELKTTDYSVLTTKKTYSDDKEMKEEDTSLVNMSTPDPDANGLESYTTLPEATEKSHFFLATALVTESIPAEHVVTDSPIKKEESTKHFPKGMRPTIQESDTELLFSGLGSGEEVLPTLPTESVNFTEVEQINNTLYPHTSQVESTSSDKIEDFNRMENVAKEVGPLVSQTDIFEGSGSVTSTTLIEILSDTGAEGPTVAPLPFSTDIGHPQNQTVRWAEEIQTSRPQTITEQDSNKNSSTAEINETTTSSTDFLARAYGFEMAKEFVTSAPKPSDLYYEPSGEGSGEVDIVDSFHTSATTQATRQESSTTFVSDGSLEKHPEVPSAKAVTADGFPTVSVMLPLHSEQNKSSPDPTSTLSNTVSYERSTDGSFQDRFREFEDSTLKPNRKKPTENIIIDLDKEDKDLILTITESTILEILPELTSDKNTIIDIDHTKPVYEDILGMQTDIDTEVPSEPHDSNDESNDDSTQVQEIYEAAVNLSLTEETFEGSADVLASYTQATHDESMTYEDRSQLDHMGFHFTTGIPAPSTETELDVLLPTATSLPIPRKSATVIPEIEGIKAEAKALDDMFESSTLSDGQAIADQSEIIPTLGQFERTQEEYEDKKHAGPSFQPEFSSGAEEALVDHTPYLSIATTHLMDQSVTEVPDVMEGSNPPYYTDTTLAVSTFAKLSSQTPSSPLTIYSGSEASGHTEIPQPSALPGIDVGSSVMSPQDSFKEIHVNIEATFKPSSEEYLHITEPPSLSPDTKLEPSEDDGKPELLEEMEASPTELIAVEGTEILQDFQNKTDGQVSGEAIKMFPTIKTPEAGTVITTADEIELEGATQWPHSTSASATYGVEAGVVPWLSPQTSERPTLSSSPEINPETQAALIRGQDSTIAASEQQVAARILDSNDQATVNPVEFNTEVATPPFSLLETSNETDFLIGINEESVEGTAIYLPGPDRCKMNPCLNGGTCYPTETSYVCTCVPGYSGDQCELDFDECHSNPCRNGATCVDGFNTFRCLCLPSYVGALCEQDTETCDYGWHKFQGQCYKYFAHRRTWDAAERECRLQGAHLTSILSHEEQMFVNRVGHDYQWIGLNDKMFEHDFRWTDGSTLQYENWRPNQPDSFFSAGEDCVVIIWHENGQWNDVPCNYHLTYTCKKGTVACGQPPVVENAKTFGKMKPRYEINSLIRYHCKDGFIQRHLPTIRCLGNGRWAIPKITCMNPSAYQRTYSMKYFKNSSSAKDNSINTSKHDHRWSRRWQESRR

SEQ ID NO: 292 - protein, 618 aa, Homo sapiens
PMLVPLAKLSCLAYQCFHALKIKKNYLPLCAIRWSSTSTVPRITTHYTIYPRDKDKRWEGVNMERFAEEADVVIVGAGPAGLSAAVRLKQLAVAHEKDIRVCLVEKAAQIGAHTLSGACLDPGAFKELFPDWKEKGAPLNTPVTEDRFGILTEKYRIPVPILPGLPMNNHGNYIVRLGHLVSWMGEQAEALGVEVYPGYAAAEVLFHDDGSVKGIATNDVGIQKDGAPKATFERGLELHAKVTIFAEGCHGHLAKQLYKKFDLRANCEPQTYGIGLKELWVIDEKNWKPGRVDHTVGWPLDRHTYGGSFLYHLNEGEPLVALGLVVGLDYQNPYLSPFREFQRWKHHPSIRPTLEGGKRIAYGARALNEGGFQSIPKLTFPGGLLIGCSPGFMNVPKIKGTHTAMKSGILAAESIFNQLTSENLQSKTIGLHVTEYEDNLKNSWVWKELYSVRNIRPSCHGVLGVYGGMIYTGIFYWILRGMEPWTLKHKGSDFERLKPAKDCTPIEYPKPDGQISFDLLSSVALSGTNHEHDQPAHLTLRDDSIPVNRNLSIYDGPEQRFCPAGVYEFVPVEQGDGFRLQINAQNCVHCKTCDIKDPSQNINWVVPEGGGGPAYNGM

SEQ ID NO: 293 - protein, 281 aa, Homo sapiens
PMKFRAKIVDGACLNHFTRISNMIAKLAKTCTLRISPDKLNFILCDKLANGGVSMWCELEQENFFNEFQMEGVSAENNEIYLELTSENLSRALKTAQNARALKIKLTNKHFPCLTVSVELLSMSSSSRIVTHDIPIKVIPRKLWKDLQEPVVPDPDVSIYLPVLKTMKSVVEKMKNISNHLVIEANLDGELNLKIETELVCVTTHFKDLGNPPLASESTHEDRNVEHMAEVHIDIRKLLQFLAGQQVNPTKALCNIVNNKMVHFDLLHEDVSLQYFIPALS

SEQ ID NO: 294 - protein, 189 aa, Homo sapiens
PMEDERSFSDICGGRLALQRRYYSPSCREFCLSCPRLSLRSLTAVTCTVWLAAYGLFTLCENSMILSAAIFITLLGLLGYLHFVKIDQETLLIIDSLGIQMTSSYASGKESTTFIEMGKVKDIVINEAIYMQKVIYYLCILLKDPVEPHGISQVVPVFQSAKPRLDCLIEVYRSCQEILAHQKATSTSP

SEQ ID NO: 295 - protein, 615 aa, Homo sapiens
PMSGIKKQKTENQQKSTNVVYQAHHVSRNKRGQVVGTRGGFRGCTVWLTGLSGAGKTTISFALEEYLVSHAIPCYSLDGDNVRHGLNRNLGFSPGDREENIRRIAEVAKLFADAGLVCITSFISPFAKDRENARKIHESAGLPFFEIFVDAPLNICESRDVKGLYKRARAGEIKGFTGIDSDYEKPETPERVLKTNLSTVSDCVHQVVELLQEQNIVPYTIIKDIHELFVPENKLDHVRAEAETLPSLSITKLDLQWVQVLSEGWATPLKGFMREKEYLQVMHFDTLLDDGVINMSIPIVLPVSAEDKTRLEGCSKFVLAHGGRRVAILRDAEFYEHRKEERCSRVWGTTCTKHPHIKMVMESGDWLVGGDLQVLEKIRWNDGLDQYRLTPLELKQKCKEMNADAVFAFQLRNPVHNGHALLMQDTRRRLLERGYKHPVLLLHPLGGWTKDDDVPLDWRMKQHAAVLEEGVLDPKSTIVAIFPSPMLYAGPTEVQWHCRSRMIAGANFYIVGRDPAGMPHPETKKDLYEPTHGGKVLSMAPGLTSVEIIPFRVAAYNKAKKAMDFYDPARHNEFDFISGTRMRKLAREGENPPDGFMAPKAWKVLTDYYRSLEKN

SEQ ID NO: 296 - protein, 352 aa, Homo sapiens
PMVIMGQCYYNETIGFFYNNSGKELSSHWRPKDVVVVALGLTVSVLVLLTNLLVIAAIASNRRFHQPIYYLLGNLAAADLFAGVAYLFLMFHTGPRTARLSLEGWFLRQGLLDTSLTASVATLLAIAVERHRSVMAVQLHSRLPRGRVVMLIVGVWVAALGLGLLPAHSWHCLCALDRCSRMAPLLSRSYLAVWALSSLLVFLLMVAVYTRIFFYVRRRVQRMAEHVSCHPRYRETTLSLVKTVVIILGAFVVCWTPGQVVLLLDGLGCESCNVLAVEKYFLLLAEANSLVNAAVYSCRDAEMRRTFRRLLCCACLRQSTRESVHYTSSAQGGASTRIMLPENGHPLMDSTL

SEQ ID NO: 297 - protein, 1191 aa, Homo sapiens
PMPVRGDRGFPPRRELSGWLRAPGMEELIWEQYTVTLQKDSKRGFGIAVSGGRDNPHFENGETSIVISDVLPGGPADGLLQENDRVVMVNGTPMEDVLHSFAVQQLRKSGKVAAIVVKRPRKVQVAALQASPPLDQDDRAFEVMDEFDGRSFRSGYSERSRLNSHGGRSRSWEDSPERGRPHERARSRERDLSRDRSRGRSLERGLDQDHARTRDRSRGRSLERGLDHDFGPSRDRDRDRSRGRSIDQDYERAYHRAYDPDYERAYSPEYRRGARHDARSRGPRSRSREHPHSRSPSPEPRGRPGPIGVLLMKSRANEEYGLRLGSQIFVKEMTRTGLATKDGNLHEGDIILKINGTVTENMSLTDARKLIEKSRGKLQLVVLRDSQQTLINIPSLNDSDSEIEDISEIESNRSFSPEERRHQYSDYDYHSSSEKLKERPSSREDTPSRLSRMGATPTPFKSTGDIAGTVVPETNKEPRYQEDPPAPQPKAAPRTFLRPSPEDEAIYGPNTKMVRFKKGDSVGLRLAGGNDVGIFVAGIQEGTSAEQEGLQEGDQILKVNTQDFRGLVREDAVLYLLEIPKGEMVTILAQSRADVYRDILACGRGDSFFIRSHFECEKETPQSLAFTRGEVFRVVDTLYDGKLGNWLAVRIGNELEKGLIPNKSRAEQMASVQNAQRDNAGDRADFWRMRGQRSGVKKNLRKSREDLTAVVSVSTKFPAYERVLLREAGFKRPVVLFGPIADIAMEKLANELPDWFQTAKTEPKDAGSEKSTGVVRLNTVRQIIEQDKHALLDVTPKAVDLLNYTQWFPIVIFFNPDSRQGVKTMRQRLNPTSNKSSRKLFDQANKLKKTCAHLFTATINLNSANDSWFGSLKDTIQHQQGEAVWVSEGKMEGMDDDPEDRMSYLTAMGADYLSCDSRLISDFEDTDGEGGAYTDNELDEPAEEPLVSSITRSSEPVQHEESIRKPSPEPRAQMRRAASSDQLRDNSPPPAFKPEPPKAKTQNKEESYDFSKSYEYKSNPSAVAGNETPGASTKGYPPPVAAKPTFGRSILKPSTPIPPQEGEEVGESSEEQDNAPKSVLGKVKIFEKMDHKARLQRMQELQEAQNARIEIAQKHPDIYAVPIKTHKPDPGTPQHTSSRPPEPQKAPSRPYQDTRGSYGSDAEEEEYRQQLSEHSKRGYYGQSARYRDTEL

SEQ ID NO: 298 - protein, 293 aa, Homo sapiens
PMQKYEKLEKIGEGTYGTVFKAKNRETHEIVALKRVRLDDDDEGVPSSALREICLLKELKHKNIVRLHDVLHSDKKLTLVFEFCDQDLKKYFDSCNGDLDPEIVKSFLFQLLKGLGFCHSRNVLHRDLKPQNLLINRNGELKLADFGLARAFGIPVRCYSAEVVTLWYRPPDVLFGAKLYSTSIDMWSAGCIFAELANAGRPLFPGNDVDDQLKRIFRLLGTPTEEQWPSMTKLPDYKPYPMYPATTSLVNVVPKLNATGRDLLQNLLKCNPVQRISAEEALQHPYFSDFCPP

SEQ ID NO: 299 - protein, 270 aa, Homo sapiens
PMSAALFSLDGPARGAPWPAEPAPFYEPGRAGKPGRGAEPGALGEPGAAAPAMYDDESAIDFSAYIDSMAAVPTLELCHDELFADLFNSNHKAGGAGPLELLPGGPARPLGPGPAAPRLLKREPDWGDGDAPGSLLPAQVAACAQTVVSLAAAGQPTPPTSPEPPRSSPRQTPAPGPAREKSAGKRGPDRGSPEYRQRRERNNIAVRKSRDKAKRRNQEMQQKLVELSAENEKLHQRVEQLTRDLAGLRQFFKQLPSPPFLPAAGTADCR

SEQ ID NO: 300 - protein, 181 aa, Homo sapiens
PMLRVLVGAVLPAMLLAAPPPINKLALFPDKSAWCEAKNITQIVGHSGCEAKSIQNRACLGQCFSYSVPNTFPQSTESLVHCDSCMPAQSMWEIVTLECPGHEEVPRVDKLVEKILHCSCQACGKEPSHEGLSVYVQGEDGPGSQPGTHPHPHPHPHPGGQTPEPEDPPGAPHTEEEGAED

SEQ ID NO: 301 - protein, 527 aa, Homo sapiens
PMRCALALSALLLLLSTPPLLPSSPSPSPSPSQNATQTTTDSSNKTAPTPASSVTIMATDTAQQSTVPTSKANEILASVKATTLGVSSDSPGTTTLAQQVSGPVNTTVARGGGSGNPTTTIESPKSTKSADTTTVATSTATAKPNTTSSQNGAEDTTNSGGKSSHSVTTDLTSTKAEHLTTPHPTSPLSPRQPTSTHPVATPTSSGHDHLMKISSSSSTVAIPGYTFTSPGMTTTLPSSVISQRTQQTSSQMPASSTAPSSQETVQPTSPATALRTPTLPETMSSSPTAASTTHRYPKTPSPTVAHESNWAKCEDLETQTQSEKQLVLNLTGNTLCAGGASDEKLISLICRAVKATFNPAQDKCGIRLASVPGSQTVVVKEITIHTKLPAKDVYERLKDKWDELKEAGVSDMKLGDQGPPEEAEDRFSMPLIITIVCMASFLLLVAALYGCCHQRLSQRKDQQRLTEELQTVENGYHDNPTLEVMETSSEMQEKKVVSLNGELGDSWIVPLDNLTKDDLDEEEDTHL

SEQ ID NO: 302 - protein, 510 aa, Homo sapiens
PMGCSAKARWAAGALGVAGLLCAVLGAVMIVMVPSLIKQQVLKNVRIDPSSLSFNMWKEIPIPFYLSVYFFDVMNPSEILKGEKPQVRERGPYVYRESRHKSNITFNNNDTVSFLEYRTFQFQPSKSHGSESDYIVMPNILVLGAAVMMENKPMTLKLIMTLAFTTLGERAFMNRTVGEIMWGYKDPLVNLINKYFPGMFPFKDKFGLFAELNNSDSGLFTVFTGVQNISRIHLVDKWNGLSKVDFWHSDQCNMINGTSGQMWPPFMTPESSLEFYSPEACRSMKLMYKESGVFEGIPTYRFVAPKTLFANGSIYPPNEGFCPCLESGIQNVSTCRFSAPLFLSHPHFLNADPVLAEAVTGLHPNQEAHSLFLDIHPVTGIPMNCSVKLQLSLYMKSVAGIGQTGKIEPVVLPLLWFAESGAMEGETLHTFYTQLVLMPKVMHYAQYVLLALGCVLLLVPVICQIRSQEKCYLFWSSSKKGSKDKEAIQAYSESLMTSAPKGSVLQEAKL

SEQ ID NO: 303 - protein, 91 aa, Homo sapiens
PMPKRKAEGDAKGDKAKVKDEPQRRSARLSAKPAPPKPEPKPKKAPAKKGEKVPKGKKGKADAGKEGNNPAENGDAKTDQAQKAEGAGDAK

SEQ ID NO: 304 - protein, 561 aa, Homo sapiens
PMYDNMSTMVYIKEDKLEKLTQDEIISKTKQVIQGLEALKNEHNSILQSLLETLKCLKKDDESNLVEEKSNMIRKSLEMLELGLSEAQVMMALSNHLNAVESEKQKLRAQVRRLCQENQWLRDELANTQQKLQKSEQSVAQLEEEKKHLEFMNQLKKYDDDISPSEDKDTDSTKEPLDDLFPNDEDDPGQGIQQQHSSAAAAAQQGGYEIPARLRTLHNLVIQYASQGRYEVAVPLCKQALEDLEKTSGHDHPDVATMLNILALVYRDQNKYKDAANLLNDALAIREKTLGKDHPAVAATLNNLAVLYGKRGKYKEAEPLCKRALEIREKVLGKDHPDVAKQLNNLALLCQNQGKYEEVEYYYQRALEIYQTKLGPDDPNVAKTKNNLASCYLKQGKFKQAETLYKEILTRAHEREFGSVDDENKPIWMHAEEREECKGKQKDGTSFGEYGGWYKACKVDSPTVTTTLKNLGALYRRQGKFEAAETLEEAAMRSRKQGLDNVHKQRVAEVLNDPENMEKRRSRESLNVDVVKYESGPDGGEEVSMSVEWNGMRKMKLGLVN

SEQ ID NO: 305 - protein, 434 aa, Homo sapiens
PMVWKVAVFLSVALGIGAVPIDDPEDGGKHWVVIVAGSNGWYNYRHQADACHAYQIIHRNGIPDEQIVVMMYDDIAYSEDNPTPGIVINRPNGTDVYQGVPKDYTGEDVTPQNFLAVLRGDAEAVKGIGSGKVLKSGPQDHVFIYFTDHGSTGILVFPNEDLHVKDLNETIHYMYKHKMYRKMVFYIEACESGSMMNHLPDNINVYATTAANPRESSYACYYDEKRSTYLGDWYSVNWMEDSDVEDLTKETLHKQYHLVKSHTNTSHVMQYGNKTISTMKVMQFQGMKRKASSPVPLPPVTHLDLTPSPDVPLTIMKRKLMNTNDLEESRQLTEEIQRHLDARHLIEKSVRKIVSLLAASEAEVEQLLSERAPLTGHSCYPEALLHFRTHCFNWHSPTYEYALRHLYVLVNLCEKPYPLHRIKLSMDHVCLGHY

SEQ ID NO: 306 - protein, 206 aa, Homo sapiens
PMCKGLAGLPASCLRSAKDMKHRLGFLLQKSDSCEHNSSHNKKDKVVICQRVSQEEVKKWAESLENLISHECGLAAFKAFLKSEYSEENIDFWISCEEYKKIKSPSKLSPKAKKIYNEFISVQATKEVNLDSCTREETSRNMLEPTITCFDEAQKKIFNLMEKDSYRRFLKSRFYLDLVNPSSCGAEKQKGAKSSADCASLVPQCA

SEQ ID NO: 307 - protein, 432 aa, Homo sapiens
PMTVKTEAAKGTLTYSRMRGMVAILIAFMKQRRMGLNDFIQKIANNSYACKHPEVQSILKISQPQEPELMNANPSPPPSPSQQINLGPSSNPHAKPSDFHFLKVIGKGSFGKVLLARHKAEEVFYAVKVLQKKAILKKKEEKHIMSERNVLLKNVKHPFLVGLHFSFQTADKLYFVLDYINGGELFYHLQRERCFLEPRARFYAAEIASALGYLHSLNIVYRDLKPENILLDSQGHIVLTDFGLCKENIEHNSTTSTFCGTPEYLAPEVLHKQPYDRTVDWWCLGAVLYEMLYGLPPFYSRNTAEMYDNILNKPLQLKPNITNSARHLLEGLLQKDRTKRLGAKDDFMEIKSHVFFSLINWDDLINKKITPPFNPNVSGPNDLRHFDPEFTEEPVPNSIGKSPDSVLVTASVKEAAEAFLGFSYAPPTDSFL

SEQ ID NO: 308 - protein, 423 aa, Homo sapiens
PMVSESHHEALAAPPVTTVATVLPSNATEPASPGEGKEDAFSKLKEKFMNELHKIPLPPWALIAIAIVAVLLVLTCCFCICKKCLFKKKNKKKGKEKGGKNAINMKDVKDLGKTMKDQALKDDDAETGLTDGEEKEEPKEEEKLGKLQYSLDYDFQNNQLLVGIIQAAELPALDMGGTSDPYVKVFLLPDKKKKFETKVHRKTLNPVFNEQFTFKVPYSELGGKTLVMAVYDFDRFSKHDIIGEFKVPMNTVDFGHVTEEWRDLQSAEKEEQEKLGDICFSLRYVPTAGKLTVVILEAKNLKKMDVGGLSDPYVKIHLMQNGKRLKKKKTTIKKNTLNPYYNESFSFEVPFEQIQKVQVVVTVLDYDKIGKNDAIGKVFVGYNSTGAELRHWSDMLANPRRPIAQWHTLQVEEEVDAMLAVKK

SEQ ID NO: 309 - protein, 201 aa, Homo sapiens
PMGNGLSDQTSILSNLPSFQSFHIVILGLDCAGKTTVLYRLQFNEFVNTVPTKGFNTEKIKVTLGNSKTVTFHFWDVGGQEKLRPLWKSYTRCTDGIVFVVDSVDVERMEEAKTELHKITRISENQGVPVLIVANKQDLRNSLSLSEIEKLLAMGELSSSTPWHLQPTCAIIGDGLKEGLEKLHDMIIKRRKMLRQQKKKR

SEQ ID NO: 310 - protein, 215 aa, Homo sapiens
PMGRRPARCYRYCKNKPYPKSRFCRGVPDAKIRIFDLGRKKAKVDEFPLCGHMVSDEYEQLSSEALEAARICANKYMVKSCGKDGFHIRVRLHPFHVIRINKMLSCAGADRLQTGMRGAFGKPQGTVARVHIGQVIMSIRTKLQNKEHVIEALRRAKFKFPGRQKIHISKKWGFTKFNADEFEDMVAEKRLIPDGCGVKYIPSRGPLDKWRALHS

SEQ ID NO: 311 - protein, 445 aa, Homo sapiens
PMREIVHLQAGQCGNQIGAKFWEVISDEHGIDPTGTYHGDSDLQLERINVYYNEATGGNYVPRAVLVDLEPGTMDSVRSGPFGQIFRPDNFVFGQSGAGNNWAKGHYTEGAELVDAVLDVVRKEAESCDCLQGFQLTHSLGGGTGSGMGTLLISKIREEFPDRIMNTFSVVPSPKVSDTVVEPYNATLSVHQLVENTDETYCIDNEALYDICFRTLKLTTPTYGDLNHLVSATMSGVTTCLRFPGQLNADLRKLAVNMVPFPRLHFFMPGFAPLTSRGSQQYRALTVPELTQQMFDAKNMMAACDPRHGRYLTVAAVFRGRMSMKEVDEQMLSVQSKNSSYFVEWIPNNVKTAVCDIPPRGLKMAATFIGNSTAIQELFKRISEQFTAMFRRKAFLHWYTGEGMDEMEFTEAESNMNDLVSEYQQYQDATAEEGEFEEEAEEEVA

SEQ ID NO: 312 - protein, 249 aa, Homo sapiens
PMERASLIQKAKLAEQAERYEDMAAFMKGAVEKGEELSCEERNLLSVAYKNVVGGQRAAWRVLSSIEQKSNEEGSEEKGPEVREYREKVETELQGVCDTVLGLLDSHLIKEAGDAESRVFYLKMKGDYYRYLAEVATGDDKKRIIDSARSAYQEAMDISKKEMPPTNPIRLGLALNFSVFHYEIANSPEEAISLAKTTFDEAMADLHTLSEDSYKDSTLIMQLLRDNLTLWTADNAGEEGGEAPQEPQS

SEQ ID NO: 313 - protein, 839 aa, Homo sapiens
PMSSWIRWHGPAMARLWGFCWLVVGFWRAAFACPTSCKCSASRIWCSDPSPGIVAFPRLEPNSVDPENITEIFIANQKRLEIINEDDVEAYVGLRNLTIVDSGLKFVAHKAFLKNSNLQHINFTRNKLTSLSRKHFRHLDLSELILVGNPFTCSCDIMWIKTLQEAKSSPDTQDLYCLNESSKNIPLANLQIPNCGLPSANLAAPNLTVEEGKSITLSCSVAGDPVPNMYWDVGNLVSKHMNETSHTQGSLRITNISSDDSGKQISCVAENLVGEDQDSVNLTVHFAPTITFLESPTSDHHWCIPFTVKGNPKPALQWFYNGAILNESKYICTKIHVTNHTEYHGCLQLDNPTHMNNGDYTLIAKNEYGKDEKQISAHFMGWPGIDDGANPNYPDVIYEDYGTAANDIGDTTNRSNEIPSTDVTDKTGREHLSVYAVVVIASVVGFCLLVMLFLLKLARHSKFGMKDFSWFGFGKVKSRQGVGPASVISNDDDSASPLHHISNGSNTPSSSEGGPDAVIIGMTKIPVIENPQYFGITNSQLKPDTFVQHIKRHNIVLKRELGEGAFGKVFLAECYNLCPEQDKILVAVKTLKDASDNARKDFHREAELLTNLQHEHIVKFYGVCVEGDPLIMVFEYMKHGDLNKFLRAHGPDAVLMAEGNPPTELTQSQMLHIAQQIAAGMVYLASQHFVHRDLATRNCLVGENLLVKIGDFGMSRDVYSTDYYRVGGHTMLPIRWMPPESIMYRKFTTESDVWSLGVVLWEIFTYGKQPWYQLSNNEVIECITQGRVLQRPRTCPQEVYELMLGCWQREPHMRKNIKGIHTLLQNLAKASPVYLDILG

SEQ ID NO: 314 - protein, 494 aa, Homo sapiens
PMALFGALFLALLAGAHAEFPGCKIRVTSKALELVKQEGLRFLEQELETITIPDLRGKEGHFYYNISEVKVTELQLTSSELDFQPQQELMLQITNASLGLRFRRQLLYWFFYDGGYINASAEGVSIRTGLELSRDPAGRMKVSNVSCQASVSRMHAAFGGTFKKVYDFLSTFITSGMRFLLNQQICPVLYHAGTVLLNSLLDTVPVRSSVDELVGIDYSLMKDPVASTSNLDMDFRGAFFPLTERNWSLPNRAVEPQLQEEERMVYVAFSEFFFDSAMESYFRAGALQLLLVGDKVPHDLDMLLRATYFGSIVLLSPAVIDSPLKLELRVLAPPRCTIKPSGTTISVTASVTIALVPPDQPEVQLSSMTMDARLSAKMALRGKALRTQLDLRRFRIYSNHSALESLALIPLQAPLKTMLQIGVMPMLNERTWRGVQIPLPEGINFVHEVVTNHAGFLTIGADLHFAKGLREVIEKNRPADVRASTAPTPSTAAV

SEQ ID NO: 315 - protein, 494 aa, Homo sapiens
PMSVDMNSQGSDSNEEDYDPNCEEEEEEEEDDPGDIEDYYVGVASDVEQQGADAFDPEEYQFTCLTYKESEGALNEHMTSLASVLKVSHSVAKLILVNFHWQVSEILDRYKSNSAQLLVEARVQPNPSKHVPTSHPPHHCAVCMQFVRKENLLSLACQHQFCRSCWEQHCSVLVKDGVGVGVSCMAQDCPLRTPEDFVFPLLPNEELREKYRRYLFRDYVESHYQLQLCPGADCPMVIRVQEPRARRVQCNRCNEVFCFKCRQMYHAPTDCATIRKWLTKCADDSETANYISAHTKDCPKCNICIEKNGGCNHMQCSKCKHDFCWMCLGDWKTHGSEYYECSRYKENPDIVNQSQQAQAREALKKYLFYFERWENHNKSLQLEAQTYQRIHEKIQERVMNNLGTWIDWQYLQNAAKLLAKCRYTLQYTYPYAYYMESGPRKKLFEYQQAQLEAEIENLSWKVERADSYDRGDLENQMHIAEQRRRTLLKDFHDT

SEQ ID NO: 316 - protein, 342 aa, Homo sapiens
PMLGAEWSKLQPTEKQRYLDEAEREKQQYMKELRAYQQSEAYKMCTEKIQEKKIKKEDSSSGLMNTLLNGHKGGDCDGFSTFDVPIFTEEFLDQNKAREAELRRLRKMNVAFEEQNAVLQRQNAEHEQRARASGAGAGAGGAEDAGAAAAAPGRAPGAHRQLRLTAGAGHGRNAHAGHSGLLHGPASRSHRARPRPAREAHRPHQGNPGPGRQRAPVRSGRAHDAEEKLWARPCHTPPRGREAGGPPFGAWSHPAPLGAPAPLKLNFCSIPLAFNLPSPLNPEKALAARYTQKNLTAEGAPPRRTATRYTGSPGHPQDTGQTKPTPSTRQDPPNYSLRGAVP

SEQ ID NO: 317 - protein, 582 aa, Homo sapiens
PMTLPMSDPTAWATAMNNLGMAPLGIAGQPILPDFDPALGMMTGIPPITPMMPGLGIVPPPIPPDMPVVKEIIHCKSCTLFPPNPNLPPPATRERPPGCKTVFVGGLPENGTEQIIVEVFEQCGEIIAIRKSKKNFCHIRFAEEYMVDKALYLSGYRIRLGSSTDKKDTGRLHVDFAQARDDLYEWECKQRMLAREERHRRRMEEERLRPPSPPPVVHYSDHECSIVAEKLKDDSKFSEAVQTLLTWIERGEVNRRSANNFYSMIQSANSHVRRLVNEKAAHEKDMEEAKEKFKQALSGILIQFEQIVAVYHSASKQKAWDHFTKAQRKNISVWCKQAEEIRNIHNDELMGIRREEEMEMSDDEIEEMTETKETEESALVSQAEALKEENDSLRWQLDAYRNEVELLKQEQGKVHREDDPNKEQQLKLLQQALQGMQQHLLKVQEEYKKKEAELEKLKDDKLQVEKMLENLKEKESCASRLCASNQDSEYPLEKTMNSSPIKSEREALLVGIISTFLHVHPFGASIEYICSYLHRLDNKICTSDVECLMGRLQHTFKQEMTGVGASLEKRWKFCGFEGLKLT

SEQ ID NO: 318 - protein, 647 aa, Homo sapiens
PMGLPRLVCAFLLAACCCCPRVAGVPGEAEQPAPELVEVEVGSTALLKCGLSQSQGNLSHVDWFSVHKEKRTLIFRVRQGQGQSEPGEYEQRLSLQDRGATLALTQVTPQDERIFLCQGKRPRSQEYRIQLRVYKAPEEPNIQVNPLGIPVNSKEPEEVATCVGRNGYPIPQVIWYKNGRPLKEEKNRVHIQSSQTVESSGLYTLQSILKAQLVKEDKDAQFYCELNYRLPSGNHMKESREVTVPVFYPTEKVWLEVEPVGMLKEGDRVEIRCLADGNPPPHFSISKQNPSTREAEEETTNDNGVLVLEPARKEHSGRYECQAWNLDTMISLLSEPQELLVNYVSDVRVSPAAPERQEGSSLTLTCEAESSQDLEFQWLREETDQVLERGPVLQLHDLKREAGGGYRCVASVPSIPGLNRTQLVKLAIFGPPWMAFKERKVWVKENMVLNLSCEASGHPRPTISWNVNGTASEQDQDPQRVLSTLNVLVTPELLETGVECTASNDLGKNTSILFLELVNLTTLTPDSNTTTGLSTSTASPHTRANSTSTERKLPEPESRGVVIVAVIVCILVLAVLGAVLYFLYKKGKLPCRRSGKQEITLPPSRKTELVVEVKSDKLPEEMGLLQGSSGDKRAPGDQGEKYIDLRH

SEQ ID NO: 319 - protein, 236 aa, Homo sapiens
PMDPARPLGLSILLLFLTEAALGDAAQEPTGNNAEICLLPLDYGPCRALLLRYYYDRYTQSCRQFLYGGCEGNANNFYTWEACDDACWRIEKVPKVCRLQVSVDDQCEGSTEKYFFNLSSMTCEKFFSGGCHRNRIENRFPDEATCMGFCAPKKIPSFCYSPKDEGLCSANVTRYYFNPRYRTCDAFTYTGCGGNDNNFVSREDCKRACAKALKKKKKMPKLRFASRIRKIRKKQF

SEQ ID NO: 320 - protein, 175 aa, Homo sapiens
PMLRTESCRPRSPAGQVAAASPLLLLLLLLAWCAGACRGAPILPQGLQPEQQLQLWNEIDDTCSSFLSIDSQPQASNALEELCFMIMGMLPKPQEQDEKDNTKRFLFHYSKTQKLGKSNVVSSVVHPLLQLVPHLHERRMKRFRVDEEFQSPFASQSRGYFLFRPRNGRRSAGFI

SEQ ID NO: 321 - protein, 173 aa, Homo sapiens
PMMKLKSNQTRTYDGDGYKKRAACLCFRSESEEEVLLVSSSRHPDRWIVPGGGMEPEEEPSVAAVREVCEEAGVKGTLGRLVGIFENQERKHRTYVYVLIVTEVLEDWEDSVNIGRKREWFKIEDAIKVLQYHKPVQASYFETLRQGYSANNGTPVVATTYSVSAQSSMSGIR

SEQ ID NO: 322 - protein, 128 aa, Homo sapiens
PMPKSKELVSSGSSGSDSDSEVDKKLKRKKQVAPEKPVKKQKTGETSRALSSSKQSSSSRDDNMFQIGKMRYVSVRDFKGKVLIDIREYWMDPEGEMKPGRKGISLNPEQWSQLKEQISDIDDAVRKL

SEQ ID NO: 323 - protein, 202 aa, Homo sapiens
PMVTLAELLVLLAALLATVSGYFVSIDAHAEECFFERVTSGTKMGLIFEVAEGGFLDIDVEITGPDNKGIYKGDRESSGKYTFAAHMDGTYKFCFSNRMSTMTPKIVMFTIDIGEAPKGQDMETEAHQNKLEEMINELAVAMTAVKHEQEYMEVRERIHRAINDNTNSRVVLWSFFEALVLVAMTLGQIYYLKRFFEVRRVV

SEQ ID NO: 324 - protein, 362 aa, Homo sapiens
PMTQQPLRGVTSLRFNQDQSCFCCAMETGVRIYNVEPLMEKGHLDHEQVGSMGLVEMLHRSNLLALVGGGSSPKFSEISAVLIWDDAREGKDSKEKLVLEFTFTKPVLSVRMRHDKIVIVLKNRIYVYSFPDNPRKLFEFDTRDNPKGLCDLCPSLEKQLLVFPGHKCGSLQLVDLASTKPGTSSAPFTINAHQSDIACVSLNQPGTVVASASQKGTLIRLFDTQSKEKLVELRRGTDPATLYCINFSHDSSFLCASSDKGTVHIFALKDTRLNRRSALARVGKVGPMIGQYVDSQWSLASFTVPAESACICAFGRNTSKNVNSVIAICVDGTFHKYVFTPDGNCNREAFDVYLDICDDDDF

SEQ ID NO: 325 - protein, 630 aa, Homo sapiens
PMTLLTFRDVAIEFSLEEWKCLDLAQQNLYRDVMLENYRNLFSVGLTVCKPGLITCLEQRKEPWNVKRQEAADGHPEMGFHHATQACLELLGSSDLPASASQSAGITGVNHRAQPGLNVSVDKFTALCSPGVLQTVKWFLEFRCIFSLAMSSHFTQDLLPEQGIQDAFPKRILRGYGNCGLDNLYLRKDWESLDECKLQKDYNGLNQCSSTTHSKIFQYNKYVKIFDNFSNLHRRNISNTGEKPFKCQECGKSFQMLSFLTEHQKIHTGKKFQKCGECGKTFIQCSHFTEPENIDTGEKPYKCQECNNVIKTCSVLTKNRIYAGGEHYRCEEFGKVFNQCSHLTEHEHGTEEKPCKYEECSSVFISCSSLSNQQMILAGEKLSKCETWYKGFNHSPNPSKHQRNEIGGKPFKCEECDSIFKWFSDLTKHKRIHTGEKPYKCDECGKAYTQSSHLSEHRRIHTGEKPYQCEECGKVFRTCSSLSNHKRTHSEEKPYTCEECGNIFKQLSDLTKHKKTHTGEKPYKCDECGKNFTQSSNLIVHKRIHTGEKPYKCEECGRAFMWFSDITKHKQTHTGEKPYKCDECGKNFTQSSNLIVHKRIHTGEKPYKCEKCGKAFTQFSHLTVHESIHT

SEQ ID NO: 326 - protein, 1505 aa, Homo sapiens
PMATARTFGPEREAEPAKEARVVGSELVDTYTVYIIQVTDGSHEWTVKHRYSDFHDLHEKLVAERKIDKNLLPPKKIIGKNSRSLVEKREKDLEVYLQKLLAAFPGVTPRVLAHFLHFHFYEINGITAALAEELFEKGEQLLGAGEVFAIGPLQLYAVTEQLQQGKPTCASGDAKTDLGHILDFTCRLKYLKVSGTEGPFGTSNIQEQLLPFDLSIFKSLHQVEISHCDAKHIRGLVASKPTLATLSVRFSATSMKEVLVPEASEFDEWEPEGTTLEGPVTAVIPTWQALTTLDLSHNSISEIDESVKLIPKIEFLDLSHNGLLVVDNLQHLYNLVHLDLSYNKLSSLEGLHTKLGNIKTLNLAGNLLESLSGLHKLYSLVNLDLRDNRIEQMEEVRSIGSLPCLEHVSLLNNPLSIIPDYRTKVLAQFGERASEVCLDDTVTTEKELDTVEVLKAIQKAKEVKSKLSNPEKKGGEDSRLSAAPCIRPSSSPPTVAPASASLPQPILSNQGIMFVQEEALASSLSSTDSLTPEHQPIAQGCSDSLESIPAGQAASDDLRDVPGAVGGASPEHAEPEVQVVPGSGQIIFLPFTCIGYTATNQDFIQRLSTLIRQAIERQLPAWIEAANQREEGQGEQGEEEDEEEEEEEDVAENRYFEMGPPDVEEEEGGGQGEEEEEEEEDEEAEEERLALEWALGADEDFLLEHIRILKVLWCFLIHVQGSIRQFAACLVLTDFGIAVFEIPHQESRGSSQHILSSLRFVFCFPHGDLTEFGFLMPELCLVLKVRHSENTLFIISDAANLHEFHADLRSCFAPQHMAMLCSPILYGSHTSLQEFLRQLLTFYKVAGGCQERSQGCFPVYLVYSDKRMVQTAAGDYSGNIEWASCTLCSAVRRSCCAPSEAVKSAAIPYWLLLTPQHLNVIKADFNPMPNRGTHNCRNRNSFKLSRVPLSTVLLDPTRSCTQPRGAFADGHVLELLVGYRFVTAIFVLPHEKFHFLRVYNQLRASLQDLKTVVIAKTPGTGGSPQGSFADGQPAERRASNDQRPQEVPAEALAPAPVEVPAPAPAAASASGPAKTPAPAEASTSALVPEETPVEAPAPPPAEAPAQYPSEHLIQATSEENQIPSHLPACPSLRHVASLRGSAIIELFHSSIAEVENEELRHLMWSSVVFYQTPGLEVTACVLLSTKAVYFVLHDGLRRYFSEPLQDFWHQKNTDYNNSPFHISQCFVLKLSDLQSVNVGLFDQHFRLTGSTPMQVVTCLTRDSYLTHCFLQHLMVVLSSLERTPSPEPVDKDFYSEFGNKTTGKMENYELIHSSRVKFTYPSEEEIGDLTFTVAQKMAEPEKAPALSILLYVQAFQVGMPPPGCCRGPLRPKTLLLTSSEIFLLDEDCVHYPLPEFAKEPPQRDRYRLDDGRRVRDLDRVLMGYQTYPQALTLVFDDVQGHDLMGSVTLDHFGEVPGGPARASQGREVQWQVFVPSAESREKLISLLARQWEALCGRELPVELTG

SEQ ID NO: 327 - protein, 291 aa, Homo sapiens
PMSLKLQASNVTNKNDPKSINSRVFIGNLNTALVKKSDVETIFSKYGRVAGCSVHKGYAFVQYSNERHARAAVLGENGRVLAGQTLDINMAGEPKPDRPKGLKRAASAIYRLFDYRGRLSPVPVPRAVPVKRPRVTVPLVRRVKTNVPVKLFARSTAVTTSSAKIKLKSSELQAIKTELTQIKSNIDALLSRLEQIAAEQKANPDGKKKGDGGGAGGGGGGGGSGGGGSGGGGGGGSSRPPAPQENTTSEAGLPQGEARTRDDGDEEGLLTHSEEELEHSQDTDADDGALQ

SEQ ID NO: 328 - protein, 390 aa, Homo sapiens
PMAEPDPSHPLETQAGKVQEAQDSDSDSEGGAAGGEADMDFLRNLFSQTLSLGSQKERLLDELTLEGVARYMQSERCRRVICLVGAGISTSAGIPDFRSPSTGLYDNLEKYHLPYPEAIFEISYFKKHPEPFFALAKELYPGQFKPTICHYFMRLLKDKGLLLRCYTQNIDTLERIAGLEQEDLVEAHGTFYTSHCVSASCRHEYPLSWMKEKIFSEVTPKCEDCQSLVKPDIVFFGESLPARFFSCMQSDFLKVDLLLVMGTSLQVQPFASLISKAPLSTPRLLINKEKAGQSDPFLGMIMGLGGGMDFDSKKAYRDVAWLGECDQGCLALAELLGWKKELEDLVRREHASIDAQSGAGVPNPSTSASPKKSPPPAKDEARTTEREKPQ

SEQ ID NO: 329 - protein, 205 aa, Homo sapiens
PMAAAGWRDGSGQEKYRLVVVGGGGVGKSALTIQFIQSYFVTDYDPTIEDSYTKQCVIDDRAARLDILDTAGQEEFGAMREQYMRTGEGFLLVFSVTDRGSFEEIYKFQRQILRVKDRDEFPMILIGNKADLDHQRQVTQEEGQQLARQLKVTYMEASAKIRMNVDQAFHELVRVIRKFQEQECPPSPEPTRKEKDKKGCHCVIF

SEQ ID NO: 330 - protein, 537 aa, Homo sapiens
PMETMASPGKDNYRMKSYKNNALNPEEMRRRREEEGIQLRKQKREQQLFKRRNVELINEEAAMFDSLLMDSYVSSTTGESVITREMVEMLFSDDSDLQLATTQKFRKLLSKEPSPPIDEVINTPRVVDRFVEFLKRNENCTLQFEAAWALTNIASGTSQQTKIVIEAGAVPIFIELLNSDFEDVQEQAVWALGNIAGDSSVCRDYVLNCSILNPLLTLLTKSTRLTMTRNAVWALSNLCRGKNPPPEFAKVSPCLPVLSRLLFSSDSDLLADACWALSYLSDGPNEKIQAVIDSGVCRRLVELLMHNDYKVASPALRAVGNIVTGDDIQTQVILNCSALPCLLHLLSSPKESIRKEACWTISNITAGNRAQIQAVIDANIFPVLIEILQKAEFRTRKEAAWAITNATSGGTPEQIRYLVSLGCIKPLCDLLTVMDSKIVQVALNGLENILRLGEQEGKRSGSGVNPYCGLIEEAYGLDKIEFLQSHENQEIYQKAFDLIEHYFGVEDDDSSLAPQVDETQQQFIFQQPEAPMEGFQL

SEQ ID NO: 331 - protein, 362 aa, Homo sapiens
PMYGKGKSNSSAVPSDSQAREKLALYVYEYLLHVGAQKSAQTFLSEIRWEKNITLGEPPGFLHSWWCVFWDLYCAAPERRETCEHSSEAKAFHDYSAAAAPSPVLGNIPPGDGMPVGPVPPGFFQPFMSPRYPGGPRPPLRIPNQALGGVPGSQPLLPSGMDPTRQQGHPNMGGPMQRMTPPRGMVPLGPQNYGGAMRPPLNALGGPGMPGMNMGPGGGRPWPNPTNANSIPYSSASPGNYVGPPGGGGPPGTPIMPSPADSTNSGDNMYTLMNAVPPGPNRPNFPMGPGSDGPMGGLGGMESHHMNGSLGSGDMDSISKNSPNNMSLSNQPGTPRDDGEMGGNFLNPFQSESYSPSMTMSV

SEQ ID NO: 332 - protein, 891 aa, Homo sapiens
PMKRQSERDSSPSGRGSSSSAKRPREREREAEAGGRRAAHKASGGAKHPVPARARDKPRGSGSGGGGHRDGRGTGDANHRASSGRSSGSGAGGGGRGGKASGDPGASGMSPRASPLPPPPPPPGAEPACPGSSAAAPEYKTLLISSLSPALPAEHLEDRLFHQFKRFGEISLRLSHTPELGRVAYVNFRHPQDAREARQHALARQLLLYDRPLKVEPVYLRGGGGSSRRSSSSSAAASTPPPGPPAPADPLGYLPLHGGYQYKQRSLSPVAAPPLREPRARHAAAAFALDAAAAAAVGLSRERALDYYGLYDDRGRPYGYPAVCEEDLMPEDDQRATRNLFIGNLDHSVSEVELRRAFEKYGIIEEVVIKRPARGQGGAYAFLKFQNLDMAHRAKVAMSGRVIGRNPIKIGYGKANPTTRLWVGGLGPNTSLAALAREFDRFGSIRTIDHVKGDSFAYIQYESLDAAQAACAKMRGFPLGGPDRRLRVDFAKAEETRYPQQYQPSPLPVHYELLTDGYTRHRNLDADLVRDRTPPHLLYSDRDRTFLEGDWTSPSKSSDRRNSLEGYSRSVRSRSGERWGADGDRGLPKPWEERRKRRSLSSDRGRTTHSPYEERSRTKGSGQQSERGSDRTPERSRKENHSSEGTKESSSNSLSNSRHGAEERGHHHHHHEAADSSHGKKARDSERNHRTTEAEPKPLEEPKHETKKLKNLSEYAQTLQLGWNGLLVLKNSCFPTSMHILEGDQGVISSLLKDHTSGSKLTQLKIAQRLRLDQPKLDEVTRRIKQGSPNGYAVLLATQATPSGLGTEGMPTVEPGLQRRLLRNLVSYLKQKQAAGVISLPVGGSKGRDGTGMLYAFPPCDFSQQYLQSALRTLGKLEEEHMVIVIVRDTA

SEQ ID NO: 333 - protein, 720 aa, Homo sapiens
PMSVDKAELCGSLLTWLQTFHVPSPCASPQDLSSGLAVAYVLNQIDPSWFNEAWLQGISEDPGPNWKLKVSNLKMVLRSLVEYSQDVLAHPVSEEHLPDVSLIGEFSDPAELGKLLQLVLGCAISCEKKQDHIQRIMTLEESVQHVVMEAIQELMTKDTPDSLSPETYGNFDSQSRRYYFLSEEAEEGDELQQRCLDLERQLMLLSEEKQSLAQENAGLRERMGRPEGEGTPGLTAKKLLLLQSQLEQLQEENFRLESGREDERLRCAELEREVAELQHRNQALTSLAQEAQALKDEMDELRQSSERAGQLEATLTSCRRRLGELRELRRQVRQLEERNAGHAERTRQLEDELRRAGSLRAQLEAQRRQVQELQGQLQEEAMKAEKWLFECRNLEEKYESVTKEKERLLAERDSLREANEELRCAQLQPRGLTQADPSLDPTSTPVDNLAAEILPAELRETLLRLQLENKRLCRQEAADRERQEELQRHLEDANRARHGLETQHRLNQQQLSELRAQVEDLQKALQEQGGKTEDAISILLKRKLEEHLQKLHEADLELQRKREYIEELEPPTDSSTARRIEELQHNLQKKDADLRAMEERYRRYVDKARMVMQTMEPKQRPAAGAPPELHSLRTQLRERDVRIRHLEMDFEKSRSQREQEEKLLISAWYNMGMALQQRAGEERAPAHAQSFLAQQRLATNSRRGPLGRLASLNLRPTDKH

SEQ ID NO: 334 - protein, 823 aa, Homo sapiens
PMAAAVVVAEGDSDSRPGQELLVAWNTVSTGLVPPAALGLVSSRTSGAVPPKEEELRAAVEVLRGHGLHSVLEEWFVEVLQNDLQANISPEFWNAISQCENSADEPQCLLLLLDAFGLLESRLDPYLRSLELLEKWTRLGLLMGTGAQGLREEVHTMLRGVLFFSTPRTFQEMIQRLYGCFLRVYMQSKRKGEGGTDPELEGELDSRYARRRYYRLLQSPLCAGCSSDKQQCWCRQALEQFHQLSQVLHRLSLLERVSAEAVTTTLHQVTRERMEDRCRGEYERSFLREFHKWIERVVGWLGKVFLQDGPARPASPEAGNTLRRWRCHVQRFFYRIYASLRIEELFSIVRDFPDSRPAIEDLKYCLERTDQRQQLLVSLKAALETRLLHPGVNTCDIITLYISAIKALRVLDPSMVILEVACEPIRRYLRTREDTVRQIVAGLTGDSDGTGDLAVELSKTDPASLETGQDSEDDSGEPEDWVPDPVDADPGKSSSKRRSSDIISLLVSIYGSKDLFINEYRSLLADRLLHQFSFSPEREIRNVELLKLRFGEAPMHFCEVMLKDMADSRRINANIREEDEKRPAEEQPPFGVYAVILSSEFWPPFKDEKLEVPEDIRAALEAYCKKYEQLKAMRTLSWKHTLGLVTMDVELADRTLSVAVTPVQAVILLYFQDQASWTLEELSKAVKMPVALLRRRMSVWLQQGVLREEPPGTFSVIEEERPQDRDNMVLIDSDDESDSGMASQADQKEEELLLFWTYIQAMLTNLESLSLDRIYNMLRMFVVTGPALAEIDLQELQGYLQKKVRDQQLVYSAGVYRLPKNCS

SEQ ID NO: 335 - protein, 386 aa, Homo sapiens
PMEVTASSRHYVDRLFDPDPQKVLQGVIDMKNAVIGNNKQKANLIVLGAVPRLLYLLQQETSSTELKTECAVVLGSLAMGTENNVKSLLDCHIIPALLQGLLSPDLKFIEACLRCLRTIFTSPVTPEELLYTDATVIPHLMALLSRSRYTQEYICQIFSHCCKGPDHQTILFNHGAVQNIAHLLTSLSYKVRMQALKCFSVLAFENPQVSMTLVNVLVDGELLPQIFVKMLQRDKPIEMQLTSAKCLTYMCRAGAIRTDDNCIVLKTLPCLVRMCSKERLLEERVEGAETLAYLIEPDVELQRIASITDHLIAMLADYFKYPSSVSAITDIKRLDHDLKHAHELRQAAFKLYASLGANDEDIRKKVSLGEGRPPVLTASRQGVTST

SEQ ID NO: 336 - protein, 214 aa, Homo sapiens
PMEKCSVGGLELTEQTPALLGNMAMATSLMDIGDSFGHPACPLVSRSRNSPVEDDDDDDDVVFIESIQPPSISAPAIADQRNFIFASSKNEKPQGNYSVIPPSSRDLASQKGNISETIVIDDEEDIETNGGAEKKSSCFIEWGLPGTKNKTNDLDFSTSSLSRSKVNAGMGNSGITTELTLKYIITNVTTLETGISSVNAGQDVNIIITYKTSL

SEQ ID NO: 337 - protein, 178 aa, Homo sapiens
PMPVKRSLKLDGLLEENSFDPSKITRKKSVITYSPTTGTCQMSLFASPTSSEEQKHRNGLSNEKRKKLNHPSLTESKESTTKDNDEFMMLLSKVEKLSEEIMEIMQNLSSIQALEGSRELENLIGISCASHFLKREMQKTKELMTKVNKQKLFEKSTGLPHKASRHLDSYEFLKAILN

SEQ ID NO: 338 - protein, 443 aa, Homo sapiens
PMASVVLPSGSQCAAAAAAAAPPGLRLRLLLLLFSAAALIPTGDGQNLFTKDVTVIEGEVATISCQVNKSDDSVIQLLNPNRQTIYFRDFRPLKDSRFQLLNFSSSELKVSLTNVSISDEGRYFCQLYTDPPQESYTTITVLVPPRNLMIDIQRDTAVEGEEIEVNCTAMASKPATTIRWFKGNTELKGKSEVEEWSDMYTVTSQLMLKVHKEDDGVPVICQVEHPAVTGNLQTQRYLEVQYKPQVHIQMTYPLQGLTREGDALELTCEAIGKPQPVMVTWVRVDDEMPQHAVLSGPNLFINNLNKTDNGTYRCEASNIVGKAHSDYMLYVYDPPTTIPPPTTTTTTTTTTTTTILTIITDSRAGEEGSIRAVDHAVIGGVVAVVVFAMLCLLIILGRYFARHKGTYFTHEAKGADDAADADTAIINAEGGQNNSEEKKEYFI

SEQ ID NO: 339 - protein, 552 aa, Homo sapiens
PMAEGENEVRWDGLCSRDSTTRETALENIRQTILRKTEYLRSVKETPHRPSDGLSNTESSDGLNKLLAHLLMLSKRCPFKDVREKSEFILKSIQELGIRIPRPLGQGPSRFIPEKEILQVGSEDAQMHALFADSFAALGRLDNITLVMVFHPQYLESFLKTQHYLLQMDGPLPLHYRHYIGIMAAARHQCSYLVNLHVNDFLHVGGDPKWLNGLENAPQKLQNLGELNKVLAHRPWLITKEHIEGLLKAEEHSWSLAELVHAVVLLTHYHSLASFTFGCGISPEIHCDGGHTFRPPSVSNYCICDITNGNHSVDEMPVNSAENVSVSDSFFEVEALMEKMRQLQECRDEEEASQEEMASRFEIEKRESMFVFSSDDEEVTPARAVSRHFEDTSYGYKDFSRHGMHVPTFRVQDYCWEDHGYSLVNRLYPDVGQLIDEKFHIAYNLTYNTMAMHKDVDTSMLRRAIWNYIHCMFGIRYDDYDYGEINQLLDRSFKVYIKTVVCTPEKVTKRMYDSFWRQFKHSEKVHVNLLLIEARMQAELLYALRAITRYMT

SEQ ID NO: 340 - protein, 365 aa, Homo sapiens
PMPQTVILPGPAPWGFRLSGGIDFNQPLVITRITPGSKAAAANLCPGDVILAIDGFGTESMTHADAQDRIKAAAHQLCLKIDRGETHLWSPQVSEDGKAHPFKINLESEPQDGNYFEHKHNIRPKPFVIPGRSSGCSTPSGIDCGSGRSTPSSVSTVSTICPGDLKVAAKLAPNIPLEMELPGVKIVHAQFNTPMQLYSDDNIMETLQGQVSTALGETPLMNEPTASVPPESDVYRMLHDNRNEPTQPRQSGSFRVLQGMVDDGSDDRPAGTRSVRAPVTKVHGGSGGAQRMPLCDKCGSGIVGAVVKARDKYRHPECFVCADCNLNLKQKGYFFIEGELYCETHARARTKPPEGYDTVTLYPKA

SEQ ID NO: 341 - protein, 517 aa, Homo sapiens
PMGDPSKQDILTIFKRLRSVPTNKVCFDCGAKNPSWASITYGVFLCIDCSGSHRSLGVHLSFIRSTELDSNWSWFQLRCMQVGGNASASSFFHQHGCSTNDTNAKYNSRAAQLYREKIKSLASQATRKHGTDLWLDSCVVPPLSPPPKEEDFFASHVSPEVSDTAWASAIAEPSSLTSRPVETTLENNEGGQEQGPSVEGLNVPTKATLEVSSIIKKKPNQAKKGLGAKKGSLGAQKLANTCFNEIEKQAQAADKMKEQEDLAKVVSKEESIVSSLRLAYKDLEIQMKKDEKMNISGKKNVDSDRLGMGFGNCRSVISHSVTSDMQTIEQESPIMAKPRKKYNDDSDDSYFTSSSRYFDEPVELRSSSFSSWDDSSDSYWKKETSKDTETVLKTTGYSDRPTARRKPDYEPVENTDEAQKKFGNVKAISSDMYFGRQSQADYETRARLERLSASSSISSADLFEEPRKQPAGNYSLSSVLPNAPDMAQFKQGVRSVAGKLSVFANGVVTSIQDRYGS

SEQ ID NO: 342 - protein, 756 aa, Homo sapiens
PMAAVAAVAARRRRSWASLVLAFLGVCLGITLAVDRSNFKTCEESSFCKRQRSIRPGLSPYRALLDSLQLGPDSLTVHLIHEVTKVLLVLELQGLQKNMTRFRIDELEPRRPRYRVPDVLVADPPIARLSVSGRDENSVELTMAEGPYKIILTARPFRLDLLEDRSLLLSVNARGLLEFEHQRAPRVSFSDKVNLTLGSIWDKIKNLFSRQGSKDPAEGDGAQPEETPRDGDKPEETQGKAEKDEPGAWEETFKTHSDSKPYGPMSVGLDFSLPGMEHVYGIPEHADNLRLKVTEGGEPYRLYNLDVFQYELYNPMALYGSVPVLLAHNPHRDLGIFWLNAAETWVDISSNTAGKTLFGKMMDYLQGSGETPQTDVRWMSETGIIDVFLLLGPSISDVFRQYASLTGTQALPPLFSLGYHQSRWNYRDEADVLEVDQGFDDHNLPCDVIWLDIEHADGKRYFTWDPSRFPQPRTMLERLASKRRKLVAIVDPHIKVDSGYRVHEELRNLGLYVKTRDGSDYEGWCWPGSAGYPDFTNPTMRAWWANMFSYDNYEGSAPNLFVWNDMNEPSVFNGPEVTMLKDAQHYGGWEHRDVHNIYGLYVHMATADGLRQRSGGMERPFVLARAFFAGSQRFGAVWTGDNTAEWDHLKISIPMCLSLGLVGLSFCGADVGGFFKNPEPELLVRWYQMGAYQPFFRAHAHLDTGRREPWLLPSQHNDIIRDALGQRYSLLPFWYTLLYQAHREGIPVMRCSTLRM

SEQ ID NO: 343 - protein, 1268 aa, Homo sapiens
PMGDMKTPDFDDLLAAFDIPDPTSLDAKEAIQTPSEENESPLKPPGICMDESVSLSHSGSAPDVPAVSVIVKNTSRQESFEAEKDHITPSLLHNGFRGSDLPPDPHNCGKFDSTFMNGDSARSFPGKLEPPKSEPLPTFNQFSPISSPEPEDPIKDNGFGIKPKHSDSYFPPPLGCGAVGGPVLEALAKFPVPELHMFDHFCKKEPKPEPLPLGSQQEHEQSGQNTVEPHKDPDATRFFGEALEFNSHPSNSIGESKGLARELGTCSSVPPRQRLKPAHSKLSSCVAALVALQAKRVASVTKEDQPGHTKDLSGPTKESSKGSPKMPKSPKSPRSPLEATRKSIKPSDSPRSICSDSSSKGSPSVAASSPPAIPKVRIKTIKTSSGEIKRTVTRILPDPDDPSKSPVGSPLGSAIAEAPSEMPGDEVPVEEHFPEAGTNSGSPQGARKGDESMTKASDSSSPSCSSGPRVPKGAAPGSQTGKKQQSTALQASTLAPANLLPKAVHLANLNLVPHSVAASVTAKSSVQRRSQPQLTQMSVPLVHQVKKAAPLIVEVFNKVLHSSNPVPLYAPNLSPPADSRIHVPASGYCCLECGDAFALEKSLSQHYGRRSVHIEVLCTLCSKTLLFFNKCSLLRHARDHKSKGLVMQCSQLLVKPISADQMFVSAPVNSTAPAAPAPSSSPKHGLTSGSASPPPPALPLYPDPVRLIRYSIKCLECHKQMRDYMVLAAHFQRTTEETEGLTCQVCQMLLPNQCSFCAHQRIHAHKSPYCCPECGVLCRSAYFQTHVKENCLHYARKVGYRCIHCGVVHLTLALLKSHIQERHCQVFHKCAFCPMAFKTASSTADHSATQHPTQPHRPSQLIYKCSCEMVFNKKRHIQQHFYQNVSKTQVGVFKCPECPLLFVQKPELMQHVKSTHGVPRNVDELSNLQSSADTSSSRPGSRVPTEPPATSVAARSSSLPSGRWGRPEAHRRVEARPRLRNTGWTCQECQEWVPDRESYVSHMKKSHGRTLKRYPCRQCEQSFHTPNSLRKHIRNNHDTVKKFYTCGYCTEDSPSFPRPSLLESHISLMHGIRNPDLSQTSKVKPPGGHSPQVNHLKRPVSGVGDAPGTSNGATVSSTKRHKSLFQCAKCSFATDSGLEFQSHIPQHQVDSSTAQCLLCGLCYTSASSLSRHLFIVHKVRDQEEEEEEEAAAAEMAVEVAEPEEGSGEEVPMETRENGLEECAGEPLSADPEARRLLGPAPEDDGGHNDHSQPQASQDQDSHTLSPQV

SEQ ID NO: 344 - protein, 410 aa, Homo sapiens
PMKLKQRVVLLAILLVIFIFTKVFLIDNLDTSAANREDQRAFHRMMTGLRVELAPKLDHTLQSPWEIAAQWVVPREVYPEETPELGAVMHAMATKKIIKADVGYKGTQLKALLILEGGQKVVFKPKRYSRDHVVEGEPYAGYDRHNAEVAAFHLDRILGFHRAPLVVGRFVNLRTEIKPVATEQLLSTFLTVGNNTCFYGKCYYCRETEPACADGDIMEGSVTLWLPDVWPLQKHRHPWGRTYREGKLARWEYDESYCDAVKKTSPYDSGPRLLDIIDTAVFDYLIGNADRHHYESFQDDEGASMLILLDNAKSFGNPSLDERSILAPLYQCCIIRVSTWNRLNYLKNGVLKSALKSAMAHDPISPVLSDPHLDAVDQRLLSVLATVKQCTDQFGMDTVLVEDRMPLSHL

SEQ ID NO: 345 - protein, 915 aa, Homo sapiens
PMSQSQNAIFTSPTGEENLMNSNHRDSESITDVCSNEDLPEVELVSLLEEQLPQYRLKVDTLFLYENQDWTQSPHQRQHASDALSPVLAEETFRYMILGTDRVEQMTKTYNDIDMVTHLLAERDRDLELAARIGQALLKRNHILSEQNESLEEQLGQAFDQVNQLQHELCKKDELLRIVSIASEESETDSSCSTPLRFNESFSLSQGLLQLEMLQEKLKELEEENMALRSKACHIKTETVTYEEKEQQLVSDCVKELRETNAQMSRMTEELSGKSDELIRYQEELSSLLSQIVDLQHKLKEHVIEKEELKLHLQASKDAQRQLTMELHELQDRNMECLGMLHESQEEIKELRSRSGPTAHLYFSQSYGAFTGESLAAEIEGTMRKKLSLDEESSLFKQKAQQKRVFDTVRIANDTRGRSISFPALLPIPGSNRSSVIMTAKPFESGLQQTEDKSLLNQGSSSEEVAGSSQKMGQPGPSGDSDLATALHRLSLRRQNYLSEKQFFAEEWQRKIQVLADQKEGVSGCVTPTESLASLCTTQSEITDLSSASCLRGFMPEKLQIVKPLEGSQTLYHWQQLAQPNLGTILDPRPGVITKGFTQLPGDAIYHISDLEEDEEEGITFQVQQPLEVEEKLSTSKPVTGIFLPPITSAGGPVTVATANPGKCLSCTNSTFTFTTCRILHPSDITQVTPSSGFPSLSCGSSGSSSSNTAVNSPALSYRLSIGESITNRRDSTTTFSSTMSLAKLLQERGISAKVYHSPISENPLQPLPKSLAIPSTPPNSPSHSPCPSPLPFEPRVHLSENFLASRPAETFLQEMYGLRPSRNPPDVGQLKMNLVDRLKRLGIARVVKNPGAQENGRCQEAEIGPQKPDSAVYLNSGSSLLGGLRRNQSLPVIMGSFAAPVCTSSPKMGVLKED

SEQ ID NO: 346 - protein, 356 aa, Homo sapiens
PMAEVHRRQHARVKGEAPAKSSTLRDEEELGMASAETLTVFLKLLAAGFYGVSSFLIVVVNKSVLTNYRFPSSLCVGLGQMVATVAVLWVGKALRVVKFPDLDRNVPRKTFPLPLLYFGNQITGLFSTKKLNLPMFTVLRRFSILFTMFAEGVLLKKTFSWGIKMTVFAMIIGAFVAASSDLAFDLEGYAFILINDVLTAANGAYVKQKLDSKELGKYGLLYYNALFMILPTLAIAYFTGDAQKAVEFEGWADTLFLLQFTLSCVMGFILMYATVLCTQYNSALTTTIVGCIKNILITYIGMVFGGDYIFTWTNFIGLNISIAGSLVYSYITFTEEQLSKQSEANNKLDIKGKGAV

SEQ ID NO: 347 - protein, 804 aa, Homo sapiens
PMEVKPVGEPTQEVSKFKLSTKVESTGHWLVEDHVRIWEVLKTEESSIQDWGEEVEEGAVYHVTLKRVQIQQAANKGARWLGVEGDQLPPGHTVSQYETCKIRTIKAGTLEKLVENLLTAFGDNDFTYISIFLSTYRGFASTKEVLELLLDRYGNLTSPNCEEDGSQSSSESKMVIRNAIASILRAWLDQCAEDFREPPHFPCLQKLLDYLTRMMPGSDPERRAQNLLEQFQKQEVETDNGLPNTISFSLEEEEELEGGESAEFTCFSEDLVAEQLTYMDAQLFKKVVPHHCLGCIWSRRDKKENKHLAPTIRATISQFNTLTKCVVSTILGGKELKTQQRAKIIEKWINIAHECRLLKNFSSLRAIVSALQSNSIYRLKKTWAAVPRDRMLMFEELSDIFSDHNNHLTSRELLMKEGTSKFANLDSSVKENQKRTQRRLQLQKDMGVMQGTVPYLGTFLTDLTMLDTALQDYIEGGLINFEKRRREFEVIAQIKLLQSACNSYCMTPDQKFIQWFQRQQLLTEEESYALSCEIEAAADASTTSPKPRKSMVKRLSLLFLGSDMITSPTPTKEQPKSTASGSSGESMDSVSVSSCESNHSEAEEGSITPMDTPDEPQKKLSESSSSCSSIHSMDTNSSGMSSLINPLSSPPSCNNNPKIHKRSVSVTSITSTVLPPVYNQQNEDTCIIRISVEDNNGNMYKSIMLTSQDKTPAVIQRAMLKHNLDSDPAEEYELVQVISEDKELVIPDSANVFYAMNSQVNFDFILRKKNSMEEQVKLRSRTSLTLPRTAKRGCWSYRHSKITL

SEQ ID NO: 348 - protein, 1347 aa, Homo sapiens
PMKSPRRTTLCLMFIVIYSSKAALNWNYESTIHPLSLHEHEPAGEEALRQKRAVATKSPTAEEYTVNIEISFENASFLDPIKAYLNSLSFPIHGNNTDQITDILSINVTTVCRPAGNEIWCSCETGYGWPRERCLHNLICQERDVFLPGHHCSCLKELPPNGPFCLLQEDVTLNMRVRLNVGFQEDLMNTSSALYRSYKTDLETAFRKGYGILPGFKGVTVTGFKSGSVVVTYEVKTTPPSLELIHKANEQVVQSLNQTYKMDYNSFQAVTINESNFFVTPEIIFEGDTVSLVCEKEVLSSNVSWRYEEQQLEIQNSSRFSIYTALFNNMTSVSKLTIHNITPGDAGEYVCKLILDIFEYECKKKIDVMPIQILANEEMKVMCDNNPVSLNCCSQGNVNWSKVEWKQEGKINIPGTPETDIDSSCSRYTLKADGTQCPSGSSGTTVIYTCEFISAYGARGSANIKVTFISVANLTITPDPISVSEGQNFSIKCISDVSNYDEVYWNTSAGIKIYQRFYTTRRYLDGAESVLTVKTSTREWNGTYHCIFRYKNSYSIATKDVIVHPLPLKLNIMVDPLEATVSCSGSHHIKCCIEEDGDYKVTFHMGSSSLPAAKEVNKKQVCYKHNFNASSVSWCSKTVDVCCHFTNAANNSVWSPSMKLNLVPGENITCQDPVIGVGEPGKVIQKLCRFSNVPSSPESPIGGTITYKCVGSQWEEKRNDCISAPINSLLQMAKALIKSPSQDEMLPTYLKDLSISIDKAEHEISSSPGSLGAIINILDLLSTVPTQVNSEMMTHVLSTVNVILGKPVLNTWKVLQQQWTNQSSQLLHSVERFSQALQSGDSPPLSFSQTNVQMSSTVIKSSHPETYQQRFVFPYFDLWGNVVIDKSYLENLQSDSSIVTMAFPTLQAILAQDIQENNFAESLVMTTTVSHNTTMPFRISMTFKNNSPSGGETKCVFWNFRLANNTGGWDSSGCYVEEGDGDNVTCICDHLTSFSILMSPDSPDPSSLLGILLDIISYVGVGFSILSLAACLVVEAVVWKSVTKNRTSYMRHTCIVNIAASLLVANTWFIVVAAIQDNRYILCKTACVAATFFIHFFYLSVFFWMLTLGLMLFYRLVFILHETSRSTQKAIAFCLGYGCPLAISVITLGATQPREVYTRKNVCWLNWEDTKALLAFAIPALIIVVVNITITIVVITKILRPSIGDKPCKQEKSSLFQISKSIGVLTPLLGLTWGFGLTTVFPGTNLVFHIIFAILNVFQGLFILLFGCLWDLKVQEALLNKFSLSRWSSQHSKSTSLGSSTPVFSMSSPISRRFNNLFGKTGTYNVSTPEATSSSLENSSSASSLLN

SEQ ID NO: 349 - protein, 617 aa, Homo sapiens
PMSSLAVRDPAMDRSLRSVFVGNIPYEATEEQLKDIFSEVGSVVSFRLVYDRETGKPKGYGFCEYQDQETALSAMRNLNGREFSGRALRVDNAASEKNKEELKSLGPAAPIIDSPYGDPIDPEDAPESITRAVASLPPEQMFELMKQMKLCVQNSHQEARNMLLQNPQLAYALLQAQVVMRIMDPEIALKILHRKIHVTPLIPGKSQSVSVSGPGPGPGPGLCPGPNVLLNQQNPPAPQPQHLARRPVKDIPPLMQTPIQGGIPAPGPIPAAVPGAGPGSLTPGGAMQPQLGMPGVGPVPLERGQVQMSDPRAPIPRGPVTPGGLPPRGLLGDAPNDPRGGTLLSVTGEVEPRGYLGPPHQGPPMHHASGHDTRGPSSHEMRGGPLGDPRLLIGEPRGPMIDQRGLPMDGRGGRDSRAMETRAMETEVLETRVMERRGMETCAMETRGMEARGMDARGLEMRGPVPSSRGPMTGGIQGPGPINIGAGGPPQGPRQVPGISGVGNPGAGMQGTGIQGTGMQGAGIQGGGMQGAGIQGVSIQGGGIQGGGIQGASKQGGSQPSSFSPGQSQVTPQDQEKAALIMQVLQLTADQIAMLPPEQRQSILILKEQIQKSTGAS

SEQ ID NO: 350 - protein, 956 aa, Homo sapiens
PMATGLGEPVYGLSEDEGESRILRVKVVSGIDLAKKDIFGASDPYVKLSLYVADENRELALVQTKTIKKTLNPKWNEEFYFRVNPSNHRLLFEVFDENRLTRDDFLGQVDVPLSHLPTEDPTMERPYTFKDFLLRPRSHKSRVKGFLRLKMAYMPKNGGQDEENSDQRDDMEHGWEVVDSNDSASQHQEELPPPPLPPGWEEKVDNLGRTYYVNHNNRTTQWHRPSLMDVSSESDNNIRQINQEAAHRRFRSRRHISEDLEPEPSEGGDVPEPWETISEEVNIAGDSLGLALPPPPASPGSRTSPQELSEELSRRLQITPDSNGEQFSSLIQREPSSRLRSCSVTDAVAEQGHLPPPSVAYVHTTPGLPSGWEERKDAKGRTYYVNHNNRTTTWTRPIMQLAEDGASGSATNSNNHLIEPQIRRPRSLSSPTVTLSAPLEGAKDSPVRRAVKDTLSNPQSPQPSPYNSPKPQHKVTQSFLPPGWEMRIAPNGRPFFIDHNTKTTTWEDPRLKFPVHMRSKTSLNPNDLGPLPPGWEERIHLDGRTFYIDHNSKITQWEDPRLQNPAITGPAVPYSREFKQKYDYFRKKLKKPADIPNRFEMKLHRNNIFEESYRRIMSVKRPDVLKARLWIEFESEKGLDYGGVAREWFFLLSKEMFNPYYGLFEYSATDNYTLQINPNSGLCNEDHLSYFTFIGRVAGLAVFHGKLLDGFFIRPFYKMMLGKQITLNDMESVDSEYYNSLKWILENDPTELDLMFCIDEENFGQTYQVDLKPNGSEIMVTNENKREYIDLVIQWRFVNRVQKQMNAFLEGFTELLPIDLIKIFDENELELLMCGLGDVDVNDWRQHSIYKNGYCPNHPVIQWFWKAVLLMDAEKRIRLLQFVTGTSRVPMNGFAELYGSNGPQLFTIEQWGSPEKLPRAHTCFNRLDLPPYETFEDLREKLLMAVENAQGFEGVD

SEQ ID NO: 351 - protein, 127 aa, Homo sapiens
PMPFFGNTFSPKKTPPRKSASLSNLHSLDRSTREVELGLEYGSPTMNLAGQSLKFENGQWIAETGVSGGVDRREVQRLRRRNQQLEEENNLLRLKVDILLDMLSESTAESHLMEKELDELRISRKRK

SEQ ID NO: 352 - protein, 529 aa, Homo sapiens
PMGAAASRRRALRSEAMSSVAAKVRAARAFGEYLSQSHPENRNGADHLLADAYSGHDGSPEMQPAPQNKRRLSLVSNGCYEGSLSEEPSIRKPAGEGPQPRVYTISGEPALLPSPEAEAIELAVVKGRRQRHPHHHSQPLRASPGGSREDVSRPCQSWAGSRQGSKECPGCAQLAPGPTPRAFGLDQPPLPETSGRRKKLERMYSVDRVSDDIPIRTWFPKENLFSFQTATTTMQAVFRGYAERKRRKRENDSASVIQRNFRKHLRMVGSRRVKAQTFAERRERSFSRSWSDPTPMKADTSHDSRDSSDLQSSHCTLDEAFEDLDWDTEKGLEAVACDTEGFVPPKVMLISSKVPKAEYIPTIIRRDDPSIIPILYDHEHATFEDILEEIERKLNVYHKGAKIWKMLIFCQGGPGHLYLLKNKVATFAKVEKEEDMIHFWKRLSRLMSKVNPEPNVIHIMGCYILGNPNGEKLFQNLRTLMTPYRVTFESPLELSAQGKQMIETYFDFRLYRLWKSRQHSKLLDFDDVL

SEQ ID NO: 353 - protein, 1014 aa, Homo sapiens
PMGDPGSEIIESVPPAGPEASESTTDENEDDIQFVSEGPLRPVLEYIDLVSSDDEEPSTSYTDENIKRKDHIDYQKDKVALTLARLARHVEVEKQQKEEKNRAFREKIDFQHAHGLQELEFIRGHSDTEAARLCVDQWLKMPGLKTGTINCGTKSSFRRGGHTWVSGKPTLCPIMHCNKEFDNGHLLLGHLKRFDHSPCDPTITLHGPFFSSFACVVCYKKFVTQQQYRDHLFDKEATDDGHNNNLLPQIIQCFACPNCFLLFSRKEECSKHMSGKNHFHQSFKLGDNKGIAHPISFPSFAKKLLISLCKDVPFQVKCVACHKTLRSHMELTAHFRVHCRNAGPVAVAEKSITQVAEKFILRGYCPDCNQVFVDETSTQNHKQNSGHKVRVINSVEESVLLYCHSSEGNKDPSSDLHLLLDQSKFSSLKRTMSIKESSSLECIAIPKKKMNLKDKSHEGVACVQKEKSVVKTWFCECNQRFPSEDAVEKHVFSANTMGYKCVVCGKVCDDSGVIRLHMSRIHGGAHLNNFLFWCRTCKKELTRKDTIMAHVTEFHNGHRYFYEMDEVEGETLPSSSTTLDNLTANKPSSAITVIDHSPANSSPRGKWQCRICEDMFDSQEYVKQHCMSLASHKFHRYSCAHCRKPFHKIETLYRHCQDEHDNEIKIKYFCGLCDLIFNVEEAFLSHYEEHHSIDYVFVSEKTETSIKTEDDFPVIETSNQLTCGCRESYICKVNRKEDYSRCLQIMLDKGKLWFRCSLCSATAQNLTDMNTHIHQVHKEKSDEEEQQYVIKCGTCTKAFHDPESAQQHFHRKHCFLQKPSVAHFGSEKSNLYKFTASASHTERKLKQAINYSKSLDMEKGVENDLSYQNIGGNTNWKPPLNCKIYNYLNRIGCFFLHPRCSKRKDAADFAICMHAGRLDEQLPKQIPFTILSGDQGFLELENQFKKTQRPAHILNPHHLEGDMMCALLNSISDTTKECDSDDNMGAKNTSIGEEFISTEDVELEEAIRRSLEEM

SEQ ID NO: 354 - protein, 464 aa, Homo sapiens
PMSGGTPYIGSKISLISKAEIRYEGILYTIDTENSTVALAKVRSFGTEDRPTDRPIPPRDEVFEYIIFRGSDIKDLTVCEPPKPQCSLPQDPAIVQSSLGSSTSSFQSMGSYGPFGRMPTYSQFSPSSLVGQQFGAVGVAGSSLTSFGTETSNSGTLPQSSAVGSAFTQDTRSLKTQLSQGRSSPQLDPLRKSPTMEQAVQTASAHLPAPAAVGRRSPVSTRPLPSASQKAGENQEHRQAEVHKVSRPENEQLRNDNKRQVAPGAPSAPRRGRGGHRGGRGRFGIRRDGPMKFEKDFDFESANAQFNKEEIDREFHNKLKLKEDKLEKQEKPVNGEDKGDSGVDTQNSEGNADEEDPLGPNCYYDKTKSFFDNISCDDNRERRPTWAEERRLNAETFGIPLRPNRGRGGYRGRGGLGFRGGRGRGGGRGGTFTAPRGFRGGFRGGRGGREFADFEYRKDNKVAA

SEQ ID NO: 355 - protein, 1221 aa, Homo sapiens
PMGKKQKNKSEDSTKDDIDLDALAAEIEGAGAAKEQEPQKSKGKKKKEKKKQDFDEDDILKELEELSLEAQGIKADRETVAVKPTENNEEEFTSKDKKKKGQKGKKQSFDDNDSEELEDKDSKSKKTAKPKVEMYSGSDDDDDFNKLPKKAKGKAQKSNKKWDGSEEDEDNSKKIKERSRINSSGESGDESDEFLQSRKGQKKNQKNKPGPNIESGNEDDDASFKIKTVAQKKAEKKERERKKRDEEKAKLRKLKEKEELETGKKDQSKQKESQRKFEEETVKSKVTVDTGVIPASEEKAETPTAAEDDNEGDKKKKDKKKKKGEKEEKEKEKKKGPSKATVKAMQEALAKLKEEEERQKREEEERIKRLEELEAKRKEEERLEQEKRERKKQKEKERKERLKKEGKLLTKSQREARARAEATLKLLQAQGVEVPSKDSLPKKRPIYEDKKRKKIPQQLESKEVSESMELCAAVEVMEQGVPEKEETPPPVEPEEEEDTEDAGLDDWEAMASDEETEKVEGNTVHIEVKENPEEEEEEEEEEEEDEESEEEEEEEGESEGSEGDEEDEKVSDEKDSGKTLDKKPSKEMSSDSEYDSDDDRTKEERAYDKAKRRIEKRRLEHSKNVNTEKLRAPIICVLGHVDTGKTKILDKLRHTHVQDGEAGGITQQIWATNVPLEAINEQTKMIKNFDRENVRIPGMLIIDTPGHESFSNLRNRGSSLCDIAILVVDIMHGLEPQTIESINLLKSKKCPFIVALNKIDRLYDWKKSPDSDVAATLKKQKKNTKDEFEERAKAIIVEFAQQGLNAALFYENKDPRTFVSLVPTSAHTGDGMGSLIYLLVELTQTMLSKRLAHCEELRAQVMEVKALPGMGTTIDVILINGRLKEGDTIIVPGVEGPIVTQIRGLLLPPPMKELRVKNQYEKHKEVEAAQGVKILGKDLEKTLAGLPLLVAYKEDEIPVLKDELIHELKQTLNAIKLEEKGVYVQASTLGSLEALLEFLKTSEVPYAGINIGPVHKKDVMKASVMLEHDPQYAVILAFDVRIERDAQEMADSLGVRIFSAEIIYHLFDAFTKYRQDYKKQKQEEFKHIAVFPCKIKILPQYIFNSRDPIVMGVTVEAGQVKQGTPMCVPSKNFVDIGIVTSIEINHKQVDVAKKGQEVCVKIEPIPGESPKMFGRHFEATDILVSKISRQSIDALKDWFRDEMQKSDWQLIVELKKVFEII

SEQ ID NO: 356 - protein, 282 aa, Homo sapiens
PMKLAAMIKKMCPSDSELSIPAKNCYRMVILGSSKVGKTAIVSRFLTGRFEDAYTPTIEDFHRKFYSIRGEVYQLDILDTSGNHPFPAMRRLSILTGDVFILVFSLDNRDSFEEVQRLRQQILDTKSCLKNKTKENVDVPLVICGNKGDRDFYREVDQREIEQLVGDDPQRCAYFEISAKKNSSLDQMFRALFAMAKLPSEMSPDLHRKVSVQYCDVLHKKALRNKKLLRAGSGGGGGDPGDAFGIVAPFARRPSVHSDLMYIREKASAGSQAKDKERCVIS

SEQ ID NO: 357 - protein, 407 aa, Homo sapiens
PMAAAVRQDLAQLMNSSGSHKDLAGKYRQILEKAIQLSGAEQLEALKAFVEAMVNENVSLVISRQLLTDFCTHLPNLPDSTAKEIYHFTLEKIQPRVISFEEQVASIRQHLASIYEKEEDWRNAAQVLVGIPLETGQKQYNVDYKLETYLKIARLYLEDDDPVQAEAYINRASLLQNESTNEQLQIHYKVCYARVLDYRRKFIEAAQRYNELSYKTIVHESERLEALKHALHCTILASAGQQRSRMLATLFKDERCQQLAAYGILEKMYLDRIIRGNQLQEFAAMLMPHQKATTADGSSILDRAVIEHNLLSASKLYNNITFEELGALLEIPAAKAEKIASQMITEGRMNGFIDQIDGIVHFETREALPTWDKQIQSLCFQVNNLLEKISQTAPEWTAQAMEAQMAQ

SEQ ID NO: 358 - protein, 249 aa, Homo sapiens
PMAAGMYLEHYLDSIENLPFELQRNFQLMRDLDQRTEDLKAEIDKLATEYMSSARSLSSEEKLALLKQIQEAYGKCKEFGDDKVQLAMQTYEMVDKHIRRLDTDLARFEADLKEKQIESSDYDSSSSKGKKSRTQKEKKAARARSKGKNSDEEAPKTAQKKLKLVRTSPEYGMPSVTFGSVHPSDVLDMPVDPNEPTYCLCHQVSYGEMIGCDNPDCSIEWFHFACVGLTTKPRGKWFCPRCSQERKKK

SEQ ID NO: 359 - protein, 781 aa, Homo sapiens
PMRTLEDSSGTVLHRLIQEQLRYGNLTETRTLLAIQQQALRGGAGTGGTGSPQASLEILAPEDSQVLQQATRQEPQGQEHQGGENHLAENTLYRLCPQPSKGEELPTYEEAKAHSQYYAAQQAGTRPHAGDRDPRGAPGGSRRQDEALRELRHGHVRSLSERLLQLSLERNGARAPSHMSSSHSFPQLARNQQGPPLRGPPAEGPESRGPPPQYPHVVLAHETTTAVTDPRYRARGSPHFQHAEVRILQAQVPPVFLQQQQQYQYLQQSQEHPPPPHPAALGHGPLSSLSPPAVEGPVSAQASSATSGSAHLAQMEAVLRENARLQRDNERLQRELESSAEKAGRIEKLESEIQRLSEAHESLTRASSKREALEKTMRNKMDSEMRRLQDFNRDLRERLESANRRLASKTQEAQAGSQDMVAKLLAQSYEQQQEQEKLEREMALLRGAIEDQRRRAELLEQALGNAQGRAARAEEELRKKQAYVEKVERLQQALGQLQAACEKREQLELRLRTRLEQELKALRAQQRQAGAPGGSSGSGGSPELSALRLSEQLREKEEQILALEADMTKWEQKYLEERAMRQFAMDAAATAAAQRDTTLIRHSPQPSPSSSFNEGLLTGGHRHQEMESRLKVLHAQILEKDAVIKVLQQRSRRDPGKAIQGSLRPAKSVPSVFAAAAAGTQGWQGLSSSERQTADAPARLTTADRAPTEEPVVTAPPAAHAKHGSRDGSTQTEGPPDSTSTCLPPEPDSLLGCSSSQRAASLDSVATSRVQDLSDMVEILI

SEQ ID NO: 360 - protein, 545 aa, Homo sapiens
PMRVAVAGCCHGELDKIYETLALAERRGPGPVDLLLCCGDFQAVRNEADLRCMAVPPKYRHMQTFYRYYSGEKKAPVLTLFIGGNHEASNHLQELPYGGWVAPNIYYLGLAGVVKYRGVRIGGISGIFKSHDYRKGHFECPPYNSSTIRSIYHVRNIEVYKLKQLKQPIDIFLSHDWPRSIYHYGNKKQLLKTKSFFRQEVENNTLGSPAASELLEHLKPTYWFSAHLHVKFAALMQHQAKDKGQTARATKFLALDKCLPHRDFLQILEIEHDPSAPDYLEYDIEWLTILRATDDLINVTGRLWNMPENNGLHARWDYSATEEGMKEVLEKLNHDLKVPCNFSVTAACYDPSKPQTQMQLIHRINPQTTEFCAQLGIIDINVRLQKSKEEHHVCGEYEEQDDVESNDSGEDQSEYNTDTSALSSINPDEIMLDEEEDEDSIVSAHSGMNTPSVEPSDQASEFSASFSDVRILPGSMIVSSDDTVDSTIDREGKPGGTVESGNGEDLTKVPLKRLSDEHEPEQRKKIKRRNQAIYAAVDDDDDDAA

SEQ ID NO: 361 - protein, 400 aa, Homo sapiens
PMPQLSGGGGGGGGDPELCATDEMIPFKDEGDPQKEKIFAEISHPEEEGDLADIKSSLVNESEIIPASNGHEVARQAQTSQEPYHDKAREHPDDGKHPDGGLYNKGPSYSSYSGYIMMPNMNNDPYMSNGSLSPPIPRTSNKVPVVQPSHAVHPLTPLITYSDEHFSPGSHPSHIPSDVNSKQGMSRHPPAPDIPTFYPLSPGGVGQITPPLGWQGQPVYPITGGFRQPYPSSLSVDTSMSRFSHHMIPGPPGPHTTGIPHPAIVTPQVKQEHPHTDSDLMHVKPQHEQRKEQEPKRPHIKKPLNAFMLYMKEMRANVVAECTLKESAAINQILGRRWHALSREEQAKYYELARKERQLHMQLYPGWSARDNYGKKKKRKREKLQESASGTGPRMTAAYI

SEQ ID NO: 362 - protein, 559 aa, Homo sapiens
PMEAAAQFFVESPDVVYGPEAIEAQYEYRTTRVSREGGVLKVHPTSTRFTFRTARQVPRLGVMLVGWGGNNGSTLTAAVLANRLRLSWPTRSGRKEANYYGSLTQAGTVSLGLDAEGQEVFVPFSAVLPMVAPNDLVFDGWDISSLNLAEAMRRAKVLDWGLQEQLWPHMEALRPRPSVYIPEFIAANQSARADNLIPGSRAQQLEQIRRDIRDFRSSAGLDKVIVLWTANTERFCEVIPGLNDTAENLLRTIELGLEVSPSTLFAVASILEGCAFLNGSPQNTLVPGALELAWQHRVFVGGDDFKSGQTKVKSVLVDFLIGSGLKTMSIVSYNHLGNNDGENLSAPLQFRSKEVSKSNVVDDMVQSNPVLYTPGEEPDHCVVIKYVPYVGDSKRALDEYTSELMLGGTNTLVLHNTCEDSLLAAPIMLDLALLTELCQRVSFCTDMDPEPQTFHPVLSLLSFLFKAPLVPPGSPVVNALFRQRSCIENILRACVGLPPQNHMLLEHKMERPGPSLKRVGPVAATYPMLNKKGPVPAATNGCTGDANGHLQEEPPMPTT

SEQ ID NO: 363 - protein, 452 aa, Homo sapiens
PMPREIITLQLGQCGNQIGFEFWKQLCAEHGISPEGIVEEFATEGTDRKDVFFYQADDEHYIPRAVLLDLEPRVIHSILNSPYAKLYNPENIYLSEHGGGAGNNWASGFSQGEKIHEDIFDIIDREADGSDSLEGFVLCHSIAGGTGSGLGSYLLERLNDRYPKKLVQTYSVFPYQDEMSDVVVQPYNSLLTLKRLTQNADCVVVLDNTALNRIATDRLHIQNPSFSQINQLVSTIMSASTTTLRYPGYMNNDLIGLIASLIPTPRLHFLMTGYTPLTTDQSVASVRKTTVLDVMRRLLQPKNVMVSTGRDRQTNHCYIAILNIIQGEVDPTQVHKSLQRIRERKLANFIPWGPASIQVALSRKSPYLPSAHRVSGLMMANHTSISSLFESSCQQFDKLRKRDAFLEQFRKEDMFKDNFDEMDRSREVVQELIDEYHAATQPDYISWGTQEQ

SEQ ID NO: 364 - protein, 949 aa, Homo sapiens
PMVFLPLKWSLAIMSFLLSSLLALLTVSTPSWCQSTEASPKRSDGTPFPWNKIRLPEYVIPVHYDLLIHANLTTLTFWGTTKVEITASQPTSTIILHSHHLQISRATLRKGAGERLSEEPLQVLEHPPQEQIALLAPEPLLVGLPYTVVIHYAGNLSETFHGFYKSTYRTKEGELRILASTQFEPTAARMAFPCFDEPAFKASFSIKIRREPRHLAISNMPLVKSVTVAEGLIEDHFDVTVKMSTYLVAFIISDFESVSKITKSGVKVSVYAVPDKINQADYALDAAVTLLEFYEDYFSIPYPLPKQDLAAIPDFQSGAMENWGLTTYRESALLFDAEKSSASSKLGITVTVAHELAHQWFGNLVTMEWWNDLWLNEGFAKFMEFVSVSVTHPELKVGDYFFGKCFDAMEVDALNSSHPVSTPVENPAQIREMFDDVSYDKGACILNMLREYLSADAFKSGIVQYLQKHSYKNTKNEDLWDSMASICPTDGVKGMDGFCSRSQHSSSSSHWHQEGVDVKTMMNTWTLQRGFPLITITVRGRNVHMKQEHYMKGSDGAPDTGYLWHVPLTFITSKSNMVHRFLLKTKTDVLILPEEVEWIKFNVGMNGYYIVHYEDDGWDSLTGLLKGTHTAVSSNDRASLINNAFQLVSIGKLSIEKALDLSLYLKHETEIMPVFQGLNELIPMYKLMEKRDMNEVETQFKAFLIRLLRDLIDKQTWTDEGSVSEQMLRSELLLLACVHNYQPCVQRAEGYFRKWKESNGNLSLPVDVTLAVFAVGAQSTEGWDFLYSKYQFSLSSTEKSQIEFALCRTQNKEKLQWLLDESFKGDKIKTQEFPQILTLIGRNPVGYPLAWQFLRKNWNKLVQKFELGSSSIAHMVMGTTNQFSTRTRLEEVKGFFSSLKENGSQLRCVQQTIETIEENIGWMDKNFDKIRVWLQSEKLEHDPEADATG

SEQ ID NO: 365 - protein, 401 aa, Homo sapiens
PMAAGGLSRSERKAAERVRRLREEQQRERLRQVSRILRKAAAERSAEEGRLLAESADLVTELQGRSRRREGLKRRQEEVCDDPEELRGKVRELASAVRNAKYLVVYTGAGISTAASIPDYRGPNGVWTLLQKGRSVSAADLSEAEPTLTHMSITRLHEQKLVQHVVSQNCDGLHLRSGLPRTAISELHGNMYIEVCTSCVPNREYVRVFDVTERTALHRHQTGRTCHKCGTQLRDTIVHFGERGTLGQPLNWEAATEAASRADTILCLGSSLKVLKKYPRLWCMTKPPSRRPKLYIVNLQWTPKDDWAALKLHGKCDDVMRLLMAELGLEIPAYSRWQDPIFSLATPLRAGEEGSHSRKSLCRSREEAPPGDRGAPLSSAPILGGWFGRGCTKRTKRKKVT

SEQ ID NO: 366 - protein, 363 aa, Homo sapiens
PMELGSCLEGGREAAEEEGEPEVKKRRLLCVEFASVASCDAAVAQCFLAENDWEMERALNSYFEPPVEESALERRPETISEPKTYVDLTNEETTDSTTSKISPSEDTQQENGSMFSLITWNIDGLDLNNLSERARGVCSYLALYSPDVIFLQEVIPPYYSYLKKRSSNYEIITGHEEGYFTAIMLKKSRVKLKSQEIIPFPSTKMMRNLLCVHVNVSGNELCLMTSHLESTRGHAAERMNQLKMVLKKMQEAPESATVIFAGDTNLRDREVTRCGGLPNNIVDVWEFLGKPKHCQYTWDTQMNSNLGITAACKLRFDRIFFRAAAEEGHIIPRSLDLLGLEKLDCGRFPSDHWGLLCNLDIIL

SEQ ID NO: 367 - protein, 1463 aa, Homo sapiens
PMAPVHGDDSLSDSGSFVSSRARREKKSKKGRQEALERLKKAKAGEKYKYEVEDFTGVYEEVDEEQYSKLVQARQDDDWIVDDDGIGYVEDGREIFDDDLEDDALDADEKGKDGKARNKDKRNVKKLAVTKPNNIKSMFIACAGKKTADKAVDLSKDGLLGDILQDLNTETPQITPPPVMILKKKRSIGASPNPFSVHTATAVPSGKIASPVSRKEPPLTPVPLKRAEFAGDDVQVESTEEEQESGAMEFEDGDFDEPMEVEEVDLEPMAAKAWDKESEPAEEVKQEADSGKGTVSYLGSFLPDVSCWDIDQEGDSSFSVQEVQVDSSHLPLVKGADEEQVFHFYWLDAYEDQYNQPGVVFLFGKVWIESAETHVSCCVMVKNIERTLYFLPREMKIDLNTGKETGTPISMKDVYEEFDEKIATKYKIMKFKSKPVEKNYAFEIPDVPEKSEYLEVKYSAEMPQLPQDLKGETFSHVFGTNTSSLELFLMNRKIKGPCWLEVKKSTALNQPVSWCKVEAMALKPDLVNVIKDVSPPPLVVMAFSMKTMQNAKNHQNEIIAMAALVHHSFALDKAAPKPPFQSHFCVVSKPKDCIFPYAFKEVIEKKNVKVEVAATERTLLGFFLAKVHKIDPDIIVGHNIYGFELEVLLQRINVCKAPHWSKIGRLKRSNMPKLGGRSGFGERNATCGRMICDVEISAKELIRCKSYHLSELVQQILKTERVVIPMENIQNMYSESSQLLYLLEHTWKDAKFILQIMCELNVLPLALQITNIAGNIMSRTLMGGRSERNEFLLLHAFYENNYIVPDKQIFRKPQQKLGDEDEEIDGDTNKYKKGRKKGAYAGGLVLDPKVGFYDKFILLLDFNSLYPSIIQEFNICFTTVQRVASEAQKVTEDGEQEQIPELPDPSLEMGILPREIRKLVERRKQVKQLMKQQDLNPDLILQYDIRQKALKLTANSMYGCLGFSYSRFYAKPLAALVTYKGREILMHTKEMVQKMNLEVIYGDTDSIMINTNSTNLEEVFKLGNKVKSEVNKLYKLLEIDIDGVFKSLLLLKKKKYAALVVEPTSDGNYVTKQELKGLDIVRRDWCDLAKDTGNFVIGQILSDQSRDTIVENIQKRLIEIGENVLNGSVPVSQFEINKALTKDPQDYPDKKSLPHVHVALWINSQGGRKVKAGDTVSYVICQDGSNLTASQRAYAPEQLQKQDNLTIDTQYYLAQQIHPVVARICEPIDGIDAVLIATWLGLDPTQFRVHHYHKDEENDALLGGPAQLTDEEKYRDCERFKCPCPTCGTENIYDNVFDGSGTDMEPSLYRCSNIDCKASPLTFTVQLSNKLIMDIRRFIKKYYDGWLICEEPTCRNRTRHLPLQFSRTGPLCPACMKATLQPEYSDKSLYTQLCFYRYIFDAECALEKLTTDHEKDKLKKQFFTPKVLQDYRKLKNTAEQFLSRSGYSEVNLSKLFAGCAVKS

SEQ ID NO: 368 - protein, 660 aa, Homo sapiens
PMQGSSLWLSLTFRSARVLSRARFFEWQSPGLPNTAAMENGTGPYGEERPREVQETTVTEGAAKIAFPSANEVFYNPVQEFNRDLTCAVITEFARIQLGAKGIQIKVPGEKDTQKVVVDLSEQEEEKVELKESENLASGDQPRTAAVGEICEEGLHVLEGLAASGLRSIRFALEVPGLRSVVANDASTRAVDLIRRNVQLNDVAHLVQPSQADARMLMYQHQRVSERFDVIDLDPYGSPATFLDAAVQAVSEGGLLCVTCTDMAVLAGNSGETCYSKYGAMALKSRACHEMALRIVLHSLDLRANCYQRFVVPLLSISADFYVRVFVRVFTGQAKVKASASKQALVFQCVGCGAFHLQRLGKASGVPSGRAKFSAACGPPVTPECEHCGQRHQLGGPMWAEPIHDLDFVGRVLEAVSANPGRFHTSERIRGVLSVITEELPDVPLYYTLDQLSSTIHCNTPSLLQLRSALLHADFRVSLSHACKNAVKTDAPASALWDIMRCWEKECPVKRERLSETSPAFRILSVEPRLQANFTIREDANPSSRQRGLKRFQANPEANWGPRPRARPGGKAADEAMEERRRLLQNKRKEPPEDVAQRAARLKTFPCKRFKEGTCQRGDQCCYSHSPPTPRVSADAAPDCPETSNQTPPGPGAAAGPGID

SEQ ID NO: 369 - protein, 661 aa, Homo sapiens
PMDDWKPSPLIKPFGARKKRSWYLTWKYKLTNQRALRRFCQTGAVLFLLVTVIVNIKLILDTRRAISEANEDPEPEQDYDEALGRLEPPRRRGSGPRRVLDVEVYSSRSKVYVAVDGTTVLEDEAREQGRGIHVIVLNQATGHVMAKRVFDTYSPHEDEAMVLFLNMVAPGRVLICTVKDEGSFHLKDTAKALLRSLGSQAGPALGWRDTWAFVGRKGGPVFGEKHSKSPALSSWGDPVLLKTDVPLSSAEEAECHWADTELNRRRRRFCSKVEGYGSVCSCKDPTPIEFSPDPLPDNKVLNVPVAVIAGNRPNYLYRMLRSLLSAQGVSPQMITVFIDGYYEEPMDVVALFGLRGIQHTPISIKNARVSQHYKASLTATFNLFPEAKFAVVLEEDLDIAVDFFSFLSQSIHLLEEDDSLYCISAWNDQGYEHTAEDPALLYRVETMPGLGWVLRRSLYKEELEPKWPTPEKLWDWDMWMRMPEQRRGRECIIPDVSRSYHFGIVGLNMNGYFHEAYFKKHKFNTVPGVQLRNVDSLKKEAYEVEVHRLLSEAEVLDHSKNPCEDSFLPDTEGHTYVAFIRMEKDDDFTTWTQLAKCLHIWDLDVRGNHRGLWRLFRKKNHFLVVGVPASPYSVKKLPSVTPIFLEPPPKEEGAPGAPEQT

SEQ ID NO: 370 - protein, 627 aa, Homo sapiens
PMVDVVGLERETGPRGSPWPGLPLPSLVGPAPLLTCLCPQCLSVEDALGLGEPEGSGLPPGPVLEARYVARLSAAAVLYLSNPEGTCEDARAGLWASHADHLLALLESPKALTPGLSWLLQRMQARAAGQTPKTACVDIPQLLEEAVGAGAPGSAGGVLAALLDHVRSGSCFHALPSPQYFVDFVFQQHSSEVPMTLAELSALMQRLGVGREAHSDHSHRHRGASSRDPVPLISSSNSSSVWDTVCLSARDVMAAYGLSEQAGVTPEAWAQLSPALLQQQLSGAYTSQSRPPVQDQLSQSERYLYGSLATLLICLCAVFGLLLLTCTGCRGVAHYILQTFLSLAVGALTGDAVLHLTPKVLGLHTHSEEGLSPQPTWRLLAMLAGLYAFFLFENLFNLLLPRDPEDLEDGPCGHSSHSHGGHSHGVSLQLAPSELRQPKPPHEGSRADLVAEESPELLNPEPRRLSPELRLLPYMITLGDAVHNFADGLAVGAAFASSWKTGLATSLAVFCHELPHELGDFAALLHAGLSVRQALLLNLASALTAFAGLTWHSRLESARRARPGSWQWPPACSLRSTLRHAPGDVESTGPAAPGSSSCCTTWACWAAGPSCCCCPCTRMTSPSDTLP

SEQ ID NO: 371 - protein, 797 aa, Homo sapiens
PMVLAQRRRGGCEKLRAGPQAVLASGSGFCDNMLADLGLIGTIGEDDEVPVEPESDSGDEEEEGPIVLGRRQKALGKNRSADFNPDFVFTEKEGTYDGSWALADVMSQLKKKRAATTLDEKIEKVRKKRKTEDKEAKSGKLEKEKEAKEGSEPKEQEDLQENDEEGSEDEASETDYSSADENILTKADTLKVKDRKKKKKKGQEAGGFFEDASQYDENLSFQDMNLSRPLLKAITAMGFKQPTPIQKACIPVGLLGKDICACAATGTGKTAAFALPVLERLIYKPRQAPVTRVLVLVPTRELGIQVHSVTRQLAQFCNITTCLAVGGLDVKSQEAALRAAPDILIATPGRLIDHLHNCPSFHLSSIEVLILDEADRMLDEYFEEQMKEIIRMCSHHRQTMLFSATMTDEVKDLASVSLKNPVRIFVNSNTDVAPFLRQEFIRIRPNREGDREAIVAALLTRTFTDHVMLFTQTKKQAHRMHILLGLMGLQVGELHGNLSQTQRLEALRRFKDEQIDILVATDVAARGLDIEGVKTVINFTMPNTIKHYVHRVGRTARAGRAGRSVSLVGEDERKMLKEIVKAAKAPVKARILPQDVILKFRDKIEKMEKDVYAVLQLEAEEKEMQQSEAQINTAKRLLEKGKEAVVQEPERSWFQTKEERKKEKIAKALQEFDLALRGKKKRKKFMKDAKKKGEMTAEERSQFEILKAQMFAERLAKRNRRAKRARAMPEEEPVRGPAKKQKQGKKSVFDEELTNTSKKALKQYRASPSFEERKQLGLPHQRRGGNFKSKSRYKRRK

SEQ ID NO: 372 - protein, 425 aa, Homo sapiens
PMEKQCCSHPVICSLSTMYTFLLGAIFIALSSSRILLVKYSANEENKYDYLPTTVNVCSELVKLVFCVLVSFCVIKKDHQSRNLKYASWKEFSDFMKWSIPAFLYFLDNLIVFYVLSYLQPAMAVIFSNFSIITTALLFRIVLKRRLNWIQWASLLTLFLSIVALTAGTKTLQHNLAGRGFHHDAFFSPSNSCLLFRSECPRKDNCTAKEWTFPEAKWNTTARVFSHIRLGMGHVLIIVQCFISSMANIYNEKILKEGNQLTESIFIQNSKLYFFGILFNGLTLGLQRSNRDQIKNCGFFYGHSAFSVALIFVTAFQGLSVAFILKFLDNMFHVLMAQVTTVIITTVSVLVFDFRPSLEFFLEAPSVLLSIFIYNASKPQVPEYAPRQERIRDLSGNLWERSSGDGEELERLTKPKSDESDEDTF

SEQ ID NO: 373 - protein, 212 aa, Homo sapiens
PMRLFLWNAVLTLFVTSLIGALIPEPEVKIEVLQKPFICHRKTKGGDLMLVHYEGYLEKDGSLFHSTHKHNNGQPIWFTLGILEALKGWDQGLKGMCVGEKRKLIIPPALGYGKEGKGKIPPESTLIFNIDLLEIRNGPRSHESFQEMDLNDDWKLSKDEVKAYLKKEFEKHGAVVNESHHDALVEDIFDKEDEDKDGFISAREFTYKHDEL

SEQ ID NO: 374 - protein, 555 aa, Homo sapiens
  VARIANT (1)...(555): Xaa = Any Amino Acid
PMTPTLSFLARSRSAVTLPRNGRDQAVPVCPRSASASPLTPCSVTRSVHRCAPAGERGERRKPNAGGSPAPVRRRPEASPVQKKEKKDKERENEKEKSALARERSLKKRQSLPASPRARLSASTASELSPKSKARPSSPSTSWHRPASPCPSPGPGHTLPPKPPSPRGTTASPKGRVRRKEEAKESPSAAGPEDKSQSKRRASNEKESAAPASPAPSPAPSPTPAPPQKEQPPAETPTDAAVLTSPPAPAPPVTPSKPMAGTTDREEATRLLAEKRRQAREQREREEQERRLQAERDKRMREEQLAREAEARAEREAEARRREEQEAREKAQAEQEEQERLQKQKEEAEARSREEAERQRLEREKHFQQQEQERQERRKRLEEIMKRTRKSEVSETKKQDSKERXRQRFQPRACESCGGSVPRAAEGGCAERGAHPTGASVESPKQGVASVPGEWPAASPSTPGEWLLHQRTLWGQESEPNTRDTPALCRGRSLPQESCGAVPAGHRSPLRGFALDPGTVVRAPLHHLPGCLEEKKTEQRWKWPGPLGVGPLCCF

SEQ ID NO: 375 - protein, 526 aa, Homo sapiens
PMALERLCSVLKVLLITVLVVEGIAVAQKTQDGQNIGIKHIPATQCGIWVRTSNGGHFASPNYPDSYPPNKECIYILEAAPRQRIELTFDEHYYIEPSFECRFDHLEVRDGPFGFSPLIDRYCGVKSPPLIRSTGRFMWIKFSSDEELEGLGFRAKYSFIPDPDFTYLGGILNPIPDCQFELSGADGIVRSSQVEQEEKTKPGQAVDCIWTIKATPKAKIYLRFLDYQMEHSNECKRNFVAVYDGSSSIENLKAKFCSTVANDVMLKTGIGVIRMWADEGSRLSRFRMLFTSFVEPPCTSSTFFCHSNMCINNSLVCNGVQNCAYPWDENHCKEKKKAGVFEQITKTHGTIIGITSGIVLVLLIISILVQVKQPRKKVMACKTAFNKTGFQEVFDPPHYELFSLRDKEISADLADLSEELDNYQKMRRSSTASRCIHDHHCGSQASSVKQSRTNLSSMELPFRNDFAQPQPMKTFNSTFKKSSYTFKQGHECPEQALEDRVMEEIPCEIYVRGREDSAQASISIDF

SEQ ID NO: 376 - protein, 1011 aa, Homo sapiens
PMSQLRLLPSRLGVQAARLLAAHDVPVFGWRSRSSGPPATFPSSKGGGGSSYMEEMYFAWLENPQSVHKSWDSFFREASEEAFSGSAQPRPPSVVHEGRSAVSSRTKTSKLVEDHLAVQSLIRAYQIRGHHVAQLDPLGILDADLDSFVPSDLITTIDKLAFYDLQEADLDKEFQLPTTTFIGGSENTLSLREIIRRLENTYCQHIGLEFMFINDVEQCQWIRQKFETPGVMQFSSEEKRTLLARLVRSMRFEDFLARKWSSEKRFGLEGCEVMIPALKTIIDKSSEMGIENVILGMPHRGRLNVLANVIRKDLEQIFCRFDPKLEAADEGSGDVKYHLGMYHERINRVTNRNITLSLVANPSHLEAVDPVVQGKTKAEQFYRGDAQGKKVMSILVHGDAAFAGQGVVYETFHLSDLPSYTTNGTVHVVVNNQIGFTTDPRMARSSPYPTDVARVVNAPIFHVNADDPEAVIYVCSVAAEWRNTFNKDVVVDLVCYRRRGHNEMDEPMFTQPLMYKQIHRQVPVLKKYADKLIAEGTVTLQEFEEEIAKYDRICEEAYGRSKDKKILHIKHWLDSPWPGFFNVDGEPKSMTCPATGIPEDMLTHIGSVASSVPLEDFKIHTGLSRILRGRADMTKNRTVDWALAEYMAFGSLLKEGIHVRLSGQDVERGTFSHRHHVLHDQEVDRRTCVPMNHLWPDQAPYTVCNSSLSEYGVLGFELGYAMASPNALVLWEAQFGDFHNTAQCIIDQFISTGQAKWVRHNGIVLLLPHGMEGMGPEHSSARPERFLQMSNDDSDAYPAFTKDFEVSQLYDCNWIVVNCSTPANYFHVLRRQILLPFRKPLIIFTPKSLLRHPEAKSSFDQMVSGTSFQRVIPEDGAAARAPEQVQRLIFCTGKVYYDLVKERSSQDLEEKVAITRLEQISPFPFDLIKQEAEKYPGAELAWCQEEHKNMGYYDYISPRFMTILRRARPIWYVGRDPAAAPATGNRNTHLVSLKKFLDTAFNLQAFEGKTF

SEQ ID NO: 377 - protein, 440 aa, Homo sapiens
PMWLDHRAVSQVNRINETKHSVLQYVGGVMSVEMQAPKLLWLKENLREICWDKAGHFFDLPDFLSWKATGVTARSLCSLVCKWTYSAEKGWDDSFWKMIGLEDFVADNYSKIGNQVLPPGASLGNGLTPEAARDLGLLPGIAVAASLIDAHAGGLGVIGADVRGHGLICEGQPVTSRLAVICGTSSCHMGISKDPIFVPGVWGPYFSAMVPGFWLNEGGQSVTGKLIDHMVQGHAAFPELQVKATARCQSIYAYLNSHLDLIKKAQPVGFLTVDLHVWPDFHGNRSPLADLTLKGMVTGLKLSQDLDDLAILYLATVQAIALGTRFIIEAMEAAGHSISTLFLCGGLSKNPLFVQMHADITGMPVVLSQEVESVLVGAAVLGACASGDFASVQEAMAKMSKVGKVVFPRLQDKKYYDKKYQVFLKLVEHQKEYLAIMNDD

SEQ ID NO: 378 - protein, 541 aa, Homo sapiens
PMALARPVRLFSLVTRLLLAPRRGLTVRSPDEPLPVVRIPVALQRQLEQRQSRRRNLPRPVLVRPGPLLVSARRPELNQPARLTLGRWERAPLASQGWKSRRARRDHFSIERAQQEAPAVRKLSSKGSFADLGLEPRVLHALQEAAPEVVQPTTVQSSTIPSLLRGRHVVCAAETGSGKTLSYLLPLLQRLLGQPSLDSLPIPAPRGLVLVPSRELAQQVRAVAQPLGRSLGLLVRDLEGGHGMRRIRLQLSRQPSADVLVATPGALWKALKSRLISLEQLSFLVLDEADTLLDESFLELVDYILEKSHIAEGPADLEDPFNPKAQLVLVGATFPEGVGQLLNKVASPDAVTTITSSKLHCIMPHVKQTFLRLKGADKVAELVHILKHRDRAERTGPSGTVLVFCNSSSTVNWLGYILDDHKIQHLRLQGQMPALMRVGIFQSFQKSSRDILLCTDIASRGLDSTGVELVVNYDFPPTLQDYIHRAGRVGRVGSEVPGTVISFVTHPWDVSLVQKIELAARRRRSLPGLASSVKEPLPQAT

SEQ ID NO: 379 - protein, 365 aa, Homo sapiens
PMNRAPLKRSRILHMALTGASDPSAEAEANGEKPFLLRALQIALVVSLYSVTSISMVFLNKYLLDSPSLRLDTPIFVTFYQCLVTTLLCKGLSALAACCPGAVDFPSLRLDLRVARSVLPLSVVFIGMITFNNLCLKYVGVAFYNVGRSLTTVFNVLLSYLLLKQTTSFYALLTCGIIIGGFWLGVDQEGAEGTLSWLGTVFGVLASLCVSLNAIYTTKVLPAVDGSIWRLTFYNNVNACILFLPLLLLLGELQALRDFAQLGSAHFWGMMTLGGLFGFAIGYVTGLQIKFTSPLTHNVSGTAKACAQTVLAVLYYEETKSFLWWTSNMMVLGGSSAYTWVRGWEMKKTPEEPSPKDSEKSAMGV

SEQ ID NO: 380 - protein, 514 aa, Homo sapiens
PMASVLSRRLGKRSLLGARVLGPSASEGPSAAPPSEPLLEGAAPQPFTTSDDTPCQEQPKEVLKAPSTSGLQQVAFQPGQKVYVWYGGQECTGLVEQHSWMEGQVTVWLLEQKLQVCCRVEEVWLAELQGPCPQAPPLEPGAQALAYRPVSRNIDVPKRKSDAVEMDEMMAAMVLTSLSCSPVVQSPPGTEANFSASRAACDPWKESGDISDSGSSTTSGHWSGSSGVSTPSPPHPQASPKYLGDAFGSPQTDHGFETDPDPFLLDEPAPRKRKNSVKVMYKCLWPNCGKVLRSIVGIKRHVKALHLGDTVDSDQFKREEDFYYTEVQLKEESAAAAAAAAAGTPVPGTPTSEPAPTPSMTGLPLSALPPPLHKAQSSGPEHPGPESSLPSGALSKSAPGSFWHIQADHAYQALPSFQIPVSPHIYTSVSWAAAPSAACSLSPVRSRSLSFSEPQQPAPAMKSHLIVTSPPRAQSGARKARGEAKKCRKVYGIEHRDQWCTACRWKKACQRFLD

SEQ ID NO: 381 - protein, 565 aa, Homo sapiens
PMLGGTDCRTFLTSHINLKKTLCDVILMVQERKIPAHRVVLAAASHFFNLMFTTNMLESKSFEVELKDAEPDIIEQLVEFAYTARISVNSNNVQSLLDAANQYQIEPVKKMCVDFLREQVDASNCLGISVLAECLDCPELKATADDFIHQHFTEVYKTDEFLQLDVKRVTHLLNQDTLTVRAEDQVYDAAVRWLKYDEPNRQPFMVDILAKVRFPLISKNFLSKTVQAEPLIQDNPECLKMVISGMRYHLLSPEDREELVDGTRPRRKKHDYRIALFGGSQPQSCRYFNPKDYSWTDIRCPFEKRRDAACVFWDNVVYILGGSQLFPIKRMDCYNVVKDSWYSKLGPPTPRDSLAACAAEGKIYTSGGSEVGNSALYLFECYDTRTESWHTKPSMLTQRCSHGMVEANGLIYVCGGSLGNNVSGRVLNSCEVYDPATETWTELCPMIEARKNHGLVFVKDKIFAVGGQNGLGGLDNVEYYDIKLNEWKMVSPMPWKGVTVKCAAVGSIVYVLAGFQGVGRLGHILEYNTETDKWVANSKVRAFPVTSCLICVVDTCGANEETLET

SEQ ID NO: 382 - protein, 794 aa, Homo sapiens
PMGVWLNKDDYIRDLKRIILCFLIVYMAILVGTDQDFYSLLGVSKTASSREIRQAFKKLALKLHPDKNPNNPNAHGDFLKINRAYEVLKDEDLRKKYDKYGEKGLEDNQGGQYESWNYYRYDFGIYDDDPEIITLERREFDAAVNSGELWFVNFYSPGCSHCHDLAPTWRDFAKEVDGLLRIGAVNCGDDRMLCRMKGVNSYPSLFIFRSGMAPVKYHGDRSKESLVSFAMQHVRSTVTELWTGNFVNSIQTAFAAGIGWLITFCSKGGDCLTSQTRLRLSGMLDGLVNVGWMDCATQDNLCKSLDITTSTTAYFPPGATLNNKEKNSILFLNSLDAKEIYLEVIHNLPDFELLSANTLEDRLAHHRWLLFFHFGKNENSNDPELKKLKTLLKNDHIQVGRFDCSSAPDICSNLYVFQPSLAVFKGQGTKEYEIHHGKKILYDILAFAKESVNSHVTTLGPQNFPANDKEPWLVDFFAPWCPPCRALLPELRRASNLLYGQLKFGTLDCTVHEGLCNMYNIQAYPTTVVFNQSNIHEYEGHHSAEQILEFIEDLMNPSVVSLTPTTFNELVTQRKHNEVWMVDFYSPWCHPCQVLMPEWKRMARTLTGLINVGSIDCQQYHSFCAQENVQRYPEIRFFPPKSNKAYHYHSYNGWNRDAYSLRIWGLGFLPQVSTDLTPQTFSEKVLQGKNHWVIDFYAPWCGPCQNFAPEFELLARMIKGKVKAGKVDCQAYAQTCQKAGIRAYPTVKFYFYERAKRNFQEEQINTRDAKAIAALISEKLETLRNQGKRNKDEL

SEQ ID NO: 383 - protein, 228 aa, Homo sapiens
PMACTKTLQQSQPISAGATTTTTAVAPAGGHSGSTECDLECLVCREPYSCPRLPKLLACQHAFCAICLKLLLCVQDNTWSITCPLCRKVTAVPGGLICSLRDHEAVVGQLAQPCTEVSLCPQGLVDPADLAAGHPSLVGEDGQDEVSANHVAARRLAAHLLLLALLIILIGPFIYPGVLRWVLTFIIALALLMSTLFCCLPSTRGSCWPSSRTLFCREQKHSHISSIA

SEQ ID NO: 384 - protein, 686 aa, Homo sapiens
PMAAASRSASGWALLLLVALWQQRAAGSGVFQLQLQEFINERGVLASGRPCEPGCRTFFRVCLKHFQAVVSPGPCTFGTVSTPVLGTNSFAVRDDSSGGGRNPLQLPFNFTWPGTFSLIIEAWHAPGDDLRPEALPPDALISKIAIQGSLAVGQNWLLDEQTSTLTRLRYSYRVICSDNYYGDNCSRLCKKRNDHFGHYVCQPDGNLSCLPGWTGEYCQQPICLSGCHEQNGYCSKPAECLCRPGWQGRLCNECIPHNGCRHGTCSTPWQCTCDEGWGGLFCDQDLNYCTHHSPCKNGATCSNSGQRSYTCTCRPGYTGVDCELELSECDSNPCRNGGSCKDQEDGYHCLCPPGYYGLHCEHSTLSCADSPCFNGGSCRERNQGANYACECPPNFTGSNCEKKVDRCTSNPCANGGQCLNRGPSRMCRCRPGFTGTYCELHVSDCARNPCAHGGTCHDLENGLMCTCPAGFSGRRCEVRTSIDACASSPCFNRATCYTDLSTDTFVCNCPYGFVGSRCEFPVGLPPSFPWVAVSLGVGLAVLLVLLGMVAVAVRQLRLRRPDDGSREAMNNLSDFQKDNLIPAAQLKNTNQKKELEVDCGLDKSNCGKQQNHTLDYNLAPGPLGRGTMPGKFPHSDKSLGEKAPLRLHSEKPECRISAICSPRDSMYQSVCLISEERNECVIATEV

SEQ ID NO: 385 - protein, 271 aa, Homo sapiens
PMSSYFVNSFCGRYPNGPDYQLHNYGDHSSVSEQFRDSASMHSGRYGYGYNGMDLSVGRSGSGHFGSGERARSYAASASAAPAEPRYSQPATSTHSPQPDPLPCSAVAPSPGSDSHHGGKNSLSNSSGASADAGSTHISSREGVGTASGAEEDAPASSEQASAQSEPSPAPPAQPQIYPWMRKLHISHDNIGGPEGKRARTAYTRYQTLELEKEFHFNRYLTRRRRIEIAHALCLSERQIKIWFQNRRMKWKKDNKLKSMSMAAAGGAFRP

SEQ ID NO: 386 - protein, 300 aa, Homo sapiens
PMAELGLNEHHQNEVINYMRFARSKRGLRLKTVDSCFQDLKESRLVEDTFTIDEVSEVLNGLQAVVHSEVESELINTAYTNVLLLRQLFAQAEKWYLKLQTDISELENRELLEQVAEFEKAEITSSNKKPILDVTKPKLAPLNEGGTAELLNKEILRLQEENEKLKSRLKTIEIQATNALDEKSKLEKALQDLQLDQGNQKDFIKAQDLSNLENTVAALKSEFQKTLNDKTENQKSLEENLATAKHDLLRVQEQLHMAEKELEKKFQQTAAYRNMKEILTKKNDQIKDLRKRLAQYEPED

SEQ ID NO: 387 - protein, 418 aa, Homo sapiens
PMAGPFSRLLSARPGLRLLALAGAGSLAAGFLLRPEPVRAASERRRLYPPSAEYPDLRKHNNCMASHLTPAVYARLCDKTTPTGWTLDQCIQTGVDNPGHPFIKTVGMVAGDEETYEVFADLFDPVIQERHNGYDPRTMKHTTDLDASKIRSGYFDERYVLSSRVRTGRSIRGLSLPPACTRAERREVERVVVDALSGLKGDLAGRYYRLSEMTEAEQQQLIDDHFLFDKPVSPLLTAAGMARDWPDARGIWHNNEKSFLIWVNEEDHTRVISMEKGGNMKRVFERFCRGLKEVERLIQERGWEFMWNERLGYILTCPSNLGTGLRAGVHIKLPLLSKDSRFPKILENLRLQKRGTGGVDTAATGGVFDISNLDRLGKSEVELVQLVIDGVNYLIDCERRLERGQDIRIPTPVIHTKH

SEQ ID NO: 388 - protein, 341 aa, Homo sapiens
PMSELEQLRQEAEQLRNQIQDARKACNDATLVQITSNMDSVGRIQMRTRRTLRGHLAKIYAMHWGYDSRLLVSASQDGKLIIWDSYTTNKMHAIPLRSSWVMTCAYAPSGNYVACGGLDNICSIYNLKTREGNVRVSRELPGHTGYLSCCRFLDDSQIVTSSGDTTCALWDIETAQQTTTFTGHSGDVMSLSLSPDMRTFVSGACDASSKLWDIRDGMCRQSFTGHVSDINAVSFFPNGYAFATGSDDATCRLFDLRADQELLLYSHDNIICGITSVAFSKSGRLLLAGYDDFNCNVWDTLKGDRAGVLAGHDNRVSCLGVTDDGMAVATGSWDSFLRIWN

SEQ ID NO: 389 - protein, 1315 aa, Homo sapiens
PMASKGAGMSFSRKSYRLTSDAEKSRVTGIVQEKLLNDYLNRIFSSSEHAPPAATSRKPLNFQNLPEHLDQLLQVDNEEEESQGQVEGRLGPSTVVLDHTGGFEGLLLVDDDLLGVIGHSNFGTIRSTTCVYKGKWLYEVLISSQGLMQIGWCTISCRFNQEEGVGDTHNSYAYDGNRVRKWNVTTTNYGKAWAAGDIVSCLIDLDDGTLSFCLNGVSLGTAFENLSRGLGMAYFPAISLSFKESVAFNFGSRPLRYPVAGYRPLQDPPSADLVRAQRLLGCFRAVLSVELDPVEGRLLDKESSKWRLRGQPTVLLTLAHIFHHFAPLLRKVYLVEAVLMSFLLGIVEKGTPTQAQSVVHQVLDLLWLFMEDYEVQDCLKQLMMSLLRLYRFSPIVPDLGLQIHYLRLTIAILRHEKSRKFLLSNVLFDVLRSVVFFYIKSPLRVEEAGLQELIPTTWWPHCSSREGKESTEMKEETAEERLRRRAYERGCQRLRKRIEVVEELQVQILKLLLDNKDDNGGEASRYIFLTKFRKFLQENASGRGNMPMLCPPEYMVCFLHRLISALRYYWDEYKASNPHASFSEEAYIPPQVFYNGKVDYFDLQRLGGLLSHLRKTLKDDLASKANIVIDPLELQSTAMDDLDEDEEPAPAMAQRPMQALAVGGPLPLPRPGWLSSPTLGRANRFLSTAAVSLMTPRRPLSTSEKVKVRTLSVEQRTREDIEGSHWNEGLLLGRPPEEPEQPLTENSLLEVLDGAVMMYNLSVHQQLGKMVGVSDDVNEYAMALRDTEDKLRRCPKRRKDILAELTKSQKVFSEKLDHLSRRLAWVHATVYSQEKMLDIYWLLRVCLRTIEHGDRTGSLFAFMPEFYLSVAINSYSALKNYFGPVHSMEELPGYEETLTRLAAILAKHFADARIVGTDIRDSLMQALASYVCYPHSLRAVERIPEEQRIAMVRNLLAPYEQRPWAQTNWILVRLWRGCGFGYRYTRLPHLLKTKLEDANLPSLQKPCPSTLLQQHMADLLQQGPDVAPSFLNSVLNQLNWAFSEFIGMIQEIQQAAERLERNFVDSRQLKVCATCFDLSVSLLRVLEMTITLVPEIFLDWTRPTSEMLLRRLAQLLNQVLNRVTAERNLFDRVVTLRLPGLESVDHYPILVAVTGILVQLLVRGPASEREQATSVLLADPCFQLRSICYLLGQPEPPAPGTALPAPDRKRFSLQSYADYISADELAQVEQMLAHLTSASAQAAAASLPTSEEDLCPICYAHPISAVFQPCGHKSCKACINQHLMNNKDCFFCKTTIVSVEDWEKGANTSTTSSAA

SEQ ID NO: 390 - protein, 956 aa, Homo sapiens
PMLPGRLCWVPLLLALGVGSGSGGGGDSRQRRLLAAKVNKHKPWIETSYHGVITENNDTVILDPPLVALDKDAPVPFAGEICAFKIHGQELPFEAVVLNKTSGEGRLRAKSPIDCELQKEYTFIIQAYDCGAGPHETAWKKSHKAVVHIQVKDVNEFAPTFKEPAYKAVVTEGKIYDSILQVEAIDEDCSPQYSQICNYEIVTTDVPFAIDRNGNIRNTEKLSYDKQHQYEILVTAYDCGQKPAAQDTLVQVDVKPVCKPGWQDWTKRIEYQPGSGSMPLFPSIHLETCDGAVSSLQIVTELQTNYIGKGCDRETYSEKSLQKLCGASSGIIDLLPSPSAATNWTAGLLVDSSEMIFKFDGRQGAKIPDGIVPKNLTDQFTITMWMKHGPSPGVRAEKETILCNSDKTEMNRHHYALYVHNCRLVFLLRKDFDQADTFRPAEFHWKLDQICDKEWHYYVINVEFPVVTLYMDGATYEPYLVTNDWPIHPSHIAMQLTVGACWQGGEVTKPQFAQFFHGSLASLTIRPGKMESQKVISCLQACKEGLDINSLESLGQGIKYHFNPSQSILVMEGDDIGNINRALQKVSYINSRQFPTAGVRRLKVSSKVQCFGEDVCISIPEVDAYVMVLQAIEPRITLRGTDHFWRPAAQFESARGVTLFPDIKIVSTFAKTEAPGDVKTTDPKSEVLEEMLHNLDFCDILVIGGDLDPRQECLELNHSELHQRHLDATNSTAGYSIYGVGSMSRYEQVLHHIRYRNWRPASLEARRFRIKCSELNGRYTSNEFNLEVSILHEDQVSDKEHVNHLIVQPPFLQSVHHPESRSSIQHSSVVPSIATVVIIISVCMLVFVVAMGVYRVRIAHQHFIQETEAAKESEMDWDDSALTITVNPMEKHEGPGHGEDETEGEEEEEAEEEMSSSSGSDDSEEEEEEEGMGRGRHGQNGARQAQLEWDDSTLPY

SEQ ID NO: 391 - protein, 247 aa, Homo sapiens
PMVVDFWTWEQTFQELIQEAKPRATWTLKLDGNLQLDCLAQGWKQYQQRAFGWFRCSSCQRSWASAQVQILCHTYWEHWTSQGQVRMRLFGQRCQKCSWSQYEMPEFSSDSTMRILSNLVQHILKKYYGNGTRKSPEMPVILEVSLEGSHDTANCEACTLGICGQGLKSCMTKPSKSLLPHLKTGNSSPGIGAVYLANQAKNQSAEAKEAKGSGYEKLGPSRDPDPLNICVFILLLVFIVVKCFTSE

SEQ ID NO: 392 - protein, 155 aa, Homo sapiens
PMGKSASKQFHNEVLKAHNEYRQKHGVPPLKLCKNLNREAQQYSEALASTRILKHSPESSRGQCGENLAWASYDQTGKEVADRWYSEIKNYNFQQPGFTSGTGHFTAMVWKNTKKMGVGKASASDGSSFVVARYFPAGNVVNEGFFEENVLPPKK

SEQ ID NO: 393 - protein, 1545 aa, Homo sapiens
PMAAPQDLDIAVWLATVHLEQYADTFRRHGLATAGAARGLGHEELKQLGISATGHRKRILRLLQTGTEEGSLDPKSDSAMEPSPSPAPQAQPPKPVPKPRTVFGGLSGPATTQRPGLSPALGGPGVSRSPEPSPRPPPLPTSSSEQSSALNTVEMMPNSIYFGLDSRGRAQAAQDKAPDSSQISAPTPALRPTTGTVHIMDPGCLYYGVQPVGTPGAPDRRESRGVCQGRAEHRLSRQDLEAREDAGYASLELPGDSTLLSPTLETEETSDDLISPYASFSFTADRLTPLLSGWLDKLSPQGNYVFQRRFVQFNGRSLMYFGSDKDPFPKGVIPLTAIEMTRSSKDNKFQVITGQRVFVFRTESEAQRDMWCSTLQSCLKEQRLLGHPRPPQPPRPLRTGMLELRGHKAKVFAALSPGELALYKSEQAFSLGIGICFIELQGCSVRETKSRSFDLLTPHRCFSFTAESGGARQSWAAALQEAVTETLSDYEVAEKIWSNRANRQCADCGSSRPDWAAVNLGVVICKQCAGQHRALGSGISKVQSLKLDTSVWSNEIVQLFIVLGNDRANRFWAGTLPPGEGLHPDATPGPRGEFISRKYRLGLFRKPHPQYPDHSQLLQALCAAVARPNLLKNMTQLLCVEAFEGEEPWFPPAPDGSCPGLLPSDPSPGVYNEVVVRATYSGFLYCSPVSNKAGPSPPRRGRDAPPRLWCVLGAALEMFASENSPEPLSLIQPQDIVCLGVSPPPTDPGDRFPFSFELILAGGRIQHFGTDGADSLEAWTSAVGKWFSPLSCHQLLGPGLLRLGRLWLRSPSHTAPAPGLWLSGFGLLRGDHLFLCSAPGPGPPAPEDMVHLRRLQEISVVSAADTPDKKEHLVLVETGRTLYLQGEGRLDFTAWNAAIGGAAGGGGTGLQEQQMSRGDIPIIVDACISFVTQHGLRLEGVYRKGGARARSLRLLAEFRRDARSVKLRPGEHFVEDVTDTLKRFFRELDDPVTSARLLPRWREAAELPQKNQRLEKYKDVIGCLPRVNRRTLATLIGHLYRVQKCAALNQMCTRNLALLFAPSVFQTDGRGEHEVRVLQELIDGYISVFDIDSDQVAQIDLEVSLITTWKDVQLSQAGDLIMEVYIEQQLPDNCVTLKVSPTLTAEELTNQVLEMRGTAAGMDLWVTFEIREHGELERPLHPKEKVLEQALQWCQLPEPCSASLLLKKVPLAQAGCLFTGIRRESPRVGLLRCREEPPRLLGSRFQERFFLLRGRCLLLLKEKKSSKPEREWPLEGAKVYLGIRKKLKPPTPWGFTLILEKMHLYLSCTDEDEMWDWTTSILKAQHDDQQPVVLRRHSSSDLARQKFGTMPLLPIRGDDSGATLLSANQTLRRLHNRRTLSMFFPMKSSQGSVEEQEELEEPVYEEPVYEEVGAFPELIQDTSTSFSTTREWTVKPENPLTSQKSLDQPFLSKSSTLGQEERPPEPPPGPPSKSSPQARGSLEEQLLQELSSLILRKGETTAGLGSPSQPSSPQSPSPTGLPTQTPGFPTQPPCTSSPPSSQPLT

SEQ ID NO: 394 - protein, 375 aa, Homo sapiens
PMESLLQHLDRFSELLAVSSTTYVSTWDPATVRRALQWARYLRHIHRRFGRHGPIRTALERRLHNQWRQEGGFGRGPVPGLANFQALGHCDVLLSLRLLENRALGDAARYHLVQQLFPGPGVRDADEETLQESLARLARRRSAVHMLRFNGYRENPNLQEDSLMKTQAELLLERLQEVGKAEAERPARFLSSLWERLPQNNFLKVIAVALLQPPLSRRPQEELEPGIHKSPGEGSQVLVHWLLGNSEVFAAFCRALPAGLLTLVTSRHPALSPVYLGLLTDWGQRLHYDLQKGIWVGTESQDVPWEELHNRFQSLCQAPPPLKDKVLTALETCKAQDGDFEVPGLSIWTDLLLALRSGAFRKRQVLGLSAGLSSV

SEQ ID NO: 395 - protein, 368 aa, Homo sapiens
PMATPNNLTPTNCSWWPISALESDAAKPAEAPDAPEAASPAHWPRESLVLYHWTQSFSSQKVRLVIAEKGLVCEERDVSLPQSEHKEPWFMRLNLGEEVPVIIHRDNIISDYDQIIDYVERTFTGEHVVALMPEVGSLQHARVLQYRELLDALPMDAYTHGCILHPELTTDSMIPKYATAEIRRHLANATTDLMKLDHEEEPQLSEPYLSKQKKLMAKILEHDDVSYLKKILGELAMVLDQIEAELEKRKLENEGQKCELWLCGCAFTLADVLLGATLHRLKFLGLSKKYWEDGSRPNLQSFFERVQRRFAFRKVLGDIHTTLLSAVIPNAFRLVKRKPPSFFGASFLMGSLGGMGYFAYWYLKKKYI

SEQ ID NO: 396 - protein, 882 aa, Homo sapiens
PMAADKGPAAGPRSRAAMAQWRKKKGLRKRRGAASQARGSDSEDGEFEIQAEDDARARKLGPGRPLPTFPTSECTSDVEPDTREMVRAQNKKKKKSGGFQSMGLSYPVFKGIMKKGYKVPTPIQRKTIPVILDGKDVVAMARTGSGKTACFLLPMFERLKTHSAQTGARALILSPTRELALQTLKFTKELGKFTGLKTALILGGDRMEDQFAALHENPDIIIATPGRLVHVAVEMSLKLQSVEYVVFDEADRLFEMGFAEQLQEIIARLPGGHQTVLFSATLPKLLVEFARAGLTEPVLIRLDVDTKLNEQLKTSFFLVREDTKAAVLLHLLHNVVRPQDQTVVFVATKHHAEYLTELLTTQRVSCAHIYSALDPTARKINLAKFTLGKCSTLIVTDLAARGLDIPLLDNVINYSFPAKGKLFLHRVGRVARAGRSGTAYSLVAPDEIPYLLDLHLFLGRSLTLARPLKEPSGVAGVDGMLGRVPQSVVDEEDSGLQSTLEASLELRGLARVADNAQQQYVRSRPAPSPESIKRAKEMDLVGLGLHPLFSSRFEEEELQRLRLVDSIKNYRSRATIFEINASSRDLCSQVMRAKRQKDRKAIARFQQGQQGRQEQQEGPVGPAPSRPALQEKQPEKEEEEEAGESVEDIFSEVVGRKRQRSGPNRGAKRRREEARQRDQEFYIPYRPKDFDSERGLSISGEGGAFEQQAAGAVLDLMGDEAQNLTRGRQQLKWDRKKKRFVGQSGQEDKKKIKTESGRYISSSYKRDLYQKWKQKQKIDDRDSDEEGASDRRGPERRGGKRDRGQGASRPHAPGTPAGRVRPELKTKQQILKQRRRAQKLHFLQRGGLKQLSARNRRRVQELQQGAFGRGARSKKGKMRKRM

SEQ ID NO: 397 - protein, 565 aa, Homo sapiens
PMLRTTRGPGLGPPLLQAALGLGRAGWHWPAGRAASGGRGRAWLQPTGRETGVQVYNSLTGRKEPLIVAHAEAASWYSCGPTVYDHAHLGHACSYVRFDIIRRILTKVFGCSIVMVMGITDVDDKIIKRANEMNISPASLASLYEEDFKQDMAALKVLPPTVYLRVTENIPQIISFIEGIIARGNAYSTAKGNVYFDLKSRGDKYGKLVGVVPGPVGEPADSDKRHASDFALWKAAKPQEVFWASPWGPGRPGWHIECSAIASMVFGSQLDIHSGGIDLAFPHHENEIAQCEVFHQCEQWGNYFLHSGHLHAKGKEEKMSKSLKNYITIKDFLKTFSPDVFRFFCLRSSYRSAIDYSDSAMLQAQQLLLGLGSFLEDARAYMKGQLACGSVREAMLWERLSSTKRAVKAALADDFDTPRVVDAILGLAHHGNGQLRASLKEPEGPRSPAVFGAIISYFEQFFETVGISLANQQYVSGDGSEATLHGVVDELVRFRQKVRQFALAMPEATGDARRQQLLERQPLLEACDTLRRGLTAHGINIKDRSSTTSTWELLDQRTKDQKSAG

SEQ ID NO: 398 - protein, 353 aa, Homo sapiens
PMESGGRPSLCQFILLGTTSVVTAALYSVYRQKARVSQELKGAKKVHLGEDLKSILSEAPGKCVPYAVIEGAVRSVKETLNSQFVENCKGVIQRLTLQEHKMVWNRTTHLWNDCSKIIHQRTNTVPFDLVPHEDGVDVAVRVLKPLDSVDLGLETVYEKFHPSIQSFTDVIGHYISGERPKGIQETEEMLKVGATLTGVGELVLDNNSVRLQPPKQGMQYYLSSQDFDSLLQRQESSVRLCKVLALVFGFATCATLFFILRKQYLQRQERLRLKQMQEEFQEHEAQLLSRAKPEDRESLKSACVVCLSSFKSCVFLECGHVCSCTECYRALPEPKKCPICRQAITRVIPLYNS

SEQ ID NO: 399 - protein, 199 aa, Homo sapiens
PMAQKPKVDPHVGRLGYLQALVTEFQETQSQDAKEQVLANLANFAYDPSNYEYLRQLQVLDLFLDSLSEENETLVEFAIGGLCNLCPDRANKEHILHAGGVPLIINCLSSPNEETVLSAITTLMHLSPPGRSFLPELTATPVVQCMLRFSLSASARLRNLAQIFLEDFCSPRQVAEARSRQAHSALGIPLPRSVAPRQR

SEQ ID NO: 400 - protein, 310 aa, Homo sapiens
PMEELLRRELGCSSVRATGHSGGGCISQGRSYDTDQGRVFVKVNPKAEARRMFEGEMASLTAILKTNTVKVPKPIKVLDAPGGGSVLVMEHMDMRHLSSHAAKLGAQLADLHLDNKKLGEMRLKEAGTVGRGGGQEERPFVARFGFDVVTCCGYLPQVNDWQEDWVVFYARQRIQPQMDMVEKESGDREALQLWSALQLKIPDLFRDLEIIPALLHGDLWGGNVAEDSSGPVIFDPASFYGHSEYELAIAGMFGGFSSSFYSAYHGKIPKAPGFEKRLQLYQLFHYLNHWNHFGSGYRGSSLNIMRNLVK

SEQ ID NO: 401 - protein, 492 aa, Homo sapiens
PMDHTDNELQGTNSSGSLGGLDVRRRIPIKLISKQANKAKPAPRTQRTINRMPAKAPPGDEEGFDYNEEERYDCKGGELFANQRRFPGHLFWDFQINILGEKDDTPVHFCDKCGLPIKIYGRMIPCKHVFCYDCAILHEKKGDKMCPGCSDPVQRIEQCTRGSLFMCSIVQGCKRTYLSQRDLQAHINHRHMRAGKPVTRASLENVHPPIAPPPTEIPERFIMPPDKHHMSHIPPKQHIMMPPPPLQHVPHEHYNQPHEDIRAPPAELSMAPPPPRSVSQETFRISTRKHSNLITVPIQDDSNSGAREPPPPAPAPAHHHPEYQGQPVVSHPHHIMPPQQHYAPPPPPPPPISHPMPHPPQAAGTPHLVYSQAPPPPMTSAPPPITPPPGHIIAQMPPYMNHPPPGPPPPQHGGPPVTAPPPHHYNPNSLPQFTEDQGTPSPPFTQPGGMSPGIWPAPRGPPPPPRLQGPPSQTPLPGPHHPDQTRYRPYYQ

SEQ ID NO: 402 - protein, 643 aa, Homo sapiens
PMPCGEDWLSHPLGIVQGFFAQNGVNPDWEKKVIEYFKEKLKENNAPKWVPSLNEVPLHYLKPNSFVKFRCMIQDMFDPEFYMGVYETVNQNTKAHVLHFGKYRDVAECGPQQELDLNSPRNTTLERQTFYCVPVPGESTWVKEAYVNANQARVSPSTSYTPSRHKRSYEDDDDMDLQPNKQKDQHAGARQAGSVGGLQWCGEPKRLETEASTGQQLNSLNLSSPFDLNFPLPGEKGPACLVKVYEDWDCFKVNDILELYGILSVDPVLSILNNDERDASALLDPMECTDTAEEQRVHSPPASLVPRIHVILAQKLQHINPLLPACLNKEESKTCKFVSSFMSELSPVRAELLGFLTHALLGDSLAAEYLILHLISTVYTRRDVLPLGKFTVNLSGCPRNSTFTEHLYRIIQHLVPASFRLQMTIENMNHLKFIPHKDYTANRLVSGLLQLPSNTSLVIDETLLEQGQLDTPGVHNVTALSNLITWQKVDYDFSYHQMEFPCNINVFITSEGRSLLPADCQIHLQPQLIPPNMEEYMNSLLSAVLPSVLNKFRIYLTLLRFLEYSISDEITKAVEDDFVEMRKNDPQSITADDLHQLLVVARCLSLSAGQTTLSRERWLRAKQLESLRRTRLQQQKCVNGNEL

SEQ ID NO: 403 - protein, 636 aa, Homo sapiens
PMVSQSTVRQDSPVEPWEGISDHSGIIDGSPRLLNTDHPPCQLDIRLMRHKAVWINPQDVQQQPQDLQSQVPAAGNSGTHFVTDAASPSGPSPSCLGDSLAETTLSEDTTDSVGSASPHGSSEKSSSFSLSSTEVHMVRPGYSHRVSLPTSPRILATSPYPETDSAFFEPSHLTSAADEGAVQVSRRTISSNSFSPEVFVLPVDVEKENAHFYVADMIISAMEKMKCNILSQQQTESWSKEVSGLLGSDQPDSEMTFDTNIKQESGSSTSSYSGYEGCAVLQVSPVTETRTYHDVKEICKCDVDEFVILELGDFNDITETCSCSCSSSKSVTYEPDFNSAELLAKELYRVFQKCWILSVVNSQLAGSLSAAGSIVVNEECVRKDFESSMNVVQEIKFKSRIRGTEDWAPPRFQIIFNIHPPLKRDLVVAAQNFFCAGCGTPVEPKFVKRLRYCEYLGKYFCDCCHSYAESCIPARILMMWDFKKYYVSNFSKQLLDSIWHQPIFNLLSIGQSLYAKAKELDRVKEIQEQLFHIKKLLKTCRFANSCVKERALFVNFARIRLSSSHFRQQHVEDVQRAGLAFTNSASSPPSAPGVRGSQRGENFWKVWPLQQHDAPEYCEKDCSTCLMITPICVYYW

SEQ ID NO: 404 - protein, 601 aa, Homo sapiens
PMMEERANLMHMMKLSIKVLLQSALSLGRSLDADHAPLQQFFVVMEHCLKHGLKVKKSFIGQNKSFFGPLELVEKLCPEASDIATSVRNLPELKTAVGRGRAWLYLALMQKKLADYLKVLIDNKHLLSEFYEPEALMMEEEGMVIVGLLVGLNVLDANLCLKGEDLDSQVGVIDFSLYLKDVQDLDGGKEHERITDVLDQKNYVEELNRHLSCTVGDLQTKIDGLEKTNSKLQEELSAATDRICSLQEEQQQLREQNELIRERSEKSVEITKQDTKVELETYKQTRQGLDEMYSDVWKQLKEEKKVRLELEKELELQIGMKTEMEIAMKLLEKDTHEKQDTLVALRQQLEEVKAINLQMFHKAQNAESSLQQKNEAITSFEGKTNQVMSSMKQMEERLQHSERARQGAEERSHKLQQELGGRIGALQLQLSQLHEQCSSLEKELKSEKEQRQALQRELQHEKDTSSLLRMELQQVEGLKKELRELQDEKAELQKICEEQEQALQEMGLHLSQSKLKMEDIKEVNQALKGHAWLKDDEATHCRQCEKEFSISRRKHHCRNCGHIFCNTCSSNELALPSYPKPVRVCDSCHTLLLQRCSSTAS

SEQ ID NO: 405 - protein, 353 aa, Homo sapiens
PMDFLRNLFSQTLSLGSQKERLLDELTLEGVARYMQSERCRRVICLVGAGISTSAGIPDFRSPSTGLYDNLEKYHLPYPEAIFEISYFKKHPEPFFALAKELYPGQFKPTICHYFMRLLKDKGLLLRCYTQNIDTLERIAGLEQEDLVEAHGTFYTSHCVSASCRHEYPLSWMKEKIFSEVTPKCEDCQSLVKPDIVFFGESLPARFFSCMQSDFLKVDLLLVMGTSLQVQPFASLISKAPLSTPRLLINKEKAGQSDPFLGMIMGLGGGMDFDSKKAYRDVAWLGECDQGCLALAELLGWKKELEDLVRREHASIDAQSGAGVPNPSTSASPKKSPPPAKDEARTTEREKPQ

SEQ ID NO: 406 - protein, 967 aa, Homo sapiens
PMEPQVTLNVTFKNEIQSFLVSDPENTTWADIEAMVKVSFDLNTIQIKYLDEENEEVSINSQGEYEEALKMAVKQGNQLQMQVHEGHHVVDEAPPPVVGAKRLAARAGKKPLAHYSSLVRVLGSDMKTPEDPAVQSFPLVPCDTDQPQDKPPDWFTSYLETFREQVVNETVEKLEQKLHEKLVLQNPSLGSCPSEVSMPTSEETLFLPENQFSWHIACNNCQRRIVGVRYQCSLCPSYNICEDCEAGPYGHDTNHVLLKLRRPVVGSSEPFCHSKYSTPRLPAALEQVRLQKQVDKNFLKAEKQRLRAEKKQRKAEVKELKKQLKLHRKIHLWNSIHGLQSPKSPLGRPESLLQSNTLMLPLQPCTSVMPMLSAAFVDENLPDGTHLQPGTKFIKHWRMKNTGNVKWSADTKLKFMWGNLTLASTEKKDVLVPCLKAGHVGVVSVEFIAPALEGTYTSHWRLSHKGQQFGPRVWCSIIVDPFPSEESPDNIEKGMISSSKTDDLTCQQEETFLLAKEERQLGEVTEQTEGTAACIPQKAKNVASERELYIPSVDLLTAQDLLSFELLDINIVQELERVPHNTPVDVTPCMSPLPHDSPLIEKPGLGQIEEENEGAGFKALPDSMVSVKRKAENIASVEEAEEDLSGTQFVCETVIRSLTLDAAPDHNPPCRQKSLQMTFALPEGPLGNEKEEIIHIAEEEAVMEEEEDEEDEEEEDELKDEVQSQSSASSEDYIIILPECFDTSRPLGDSMYSSALSQPGLERGAEGKPGVEAGQEPAEAGERLPGGENQPQEHSISDILTTSQTLETVPLIPEVVELPPSLPRSSPCVHHHGSPGVDLPVTIPEVSSVPDQIRGEPRGSSGLVNSRQKSYDHSRHHHGSSIAGGLVKGALSVAASAYKALFAGPPVTAQPIISEDQTAALMAHLFEMGFCDRQLNLRLLKKHNYNILQVVTELLQLNNNDWYSQRY

SEQ ID NO: 407 - protein, 372 aa, Homo sapiens
PMAAPALRLCHIAFHVPAGQPLARNLQRLFGFQPLASREVDGWRQLALRSGDAVFLVNEGAGSGEPLYGLDPRHAVPSATNLCFDVADAGAATRELAALGCSVPVPPVRVRDAQGAATYAVVSSPAGILSLTLLERAGYRGPFLPGFRPVSSAPGPGWVSRVDHLTLACTPGSSPTLLRWFHDCLGFCHLPLSPGEDPELGLEMTAGFGLGGLRLTALQAQPGSIVPTLVLAESLPGATTRQDQVEQFLARHKGPGLQHVGLYTPNIVEATEGVATAGGQFLAPPGAYYQQPGKERQIRAAGHEPHLLARQGILLDGDKGKFLLQVFTKSLFTEDTFFLELIQRQGATGFGQGNIRALWQSVQEQSARSQEA

SEQ ID NO: 408 - protein, 369 aa, Homo sapiens
PMNALLEQKEQQERLREAAALGDIREVQKLVESGVDVNSQNEVNGWTCLHWACKRNHGQVVSYLLKSGADKEILTTKGEMPVQLTSRREIRKIMGVEEEDDDDDDDDNLPQLKKESELPFVPNYLANPAFPFIYTPTAEDSAQMQNGGPSTPPASPPADGSPPLLPPGEPPLLGTFPRDHTSLALVQNGDVSAPSAILRTPESTKPGPVCQPPVSQSRSLFSSVPSKPPMSLEPQNGTYAGPAPAFQPFFFTGAFPFNMQELVLKVRIQNPSLRENDFIEIELDRQELTYQELLRVCCCELGVNPDQVEKIRKLPNTLLRKDKDVARLQDFQELELVLMISENNFLFRNAASTLTERPCYNRRASKLTY

SEQ ID NO: 409 - protein, 993 aa, Homo sapiens
PMDFRANLQRQVKPKTVSEEERKVHSPQQVDFRSVLAKKGTSKTPVPEKVPPPKPATPDFRSVLGGKKKLPAENGSSSAETLNAKAVESSKPLSNAQPSGPLKPVGNAKPAETLKPMGNAKPAETLKPMGNAKPDENLKSASKEELKKDVKNDVNCKRGHAGTTDNEKRSESQGTAPAFKQKLQDVHVAEGKKLLLQCQVSSDPPATIIWTLNGKTLKTTKFIILSQEGSLCSVSIEKALPEDRGLYKCVAKNDAGQAECSCQVTVDDAPASENTKAPEMKSRRPKSSLPPVLGTESDATVKKKPAPKTPPKAAMPPQIIQFPEDQKVRAGESVELFGKVTGTQPITCTWMKFRKQIQESEHMKVENSENGSKLTILAARQEHCGCYTLLVENKLGSRQAQVNLTVVDKPDPPAGTPCASDIRSSSLTLSWYGSSYDGGSAVQSYSIEIWDSANKTWKELATCRSTSFNVQDLLPDHEYKFRVRAINVYGTSEPSQESELTTVGEKPEEPKDEVEVSDDDEKEPEVDYRTVTINTEQKVSDFYDIEERLGSGKFGQVFRLVEKKTRKVWAGKFFKAYSAKEKENIRQEISIMNCLHHPKLVQCVDAFEEKANIVMVLEIVSGGELFERIIDEDFELTERECIKYMRQISEGVEYIHKQGIVHLDLKPENIMCVNKTGTRIKLIDFGLARRLENAGSLKVLFGTPEFVAPEVINYEPIGYATDMWSIGVICYILVSGLSPFMGDNDNETLANVTSATWDFDDEAFDEISDDAKDFISNLLKKDMKNRLDCTQCLQHPWLMKDTKNMEAKKLSKDRMKKYMARRKWQKTGNAVRAIGRLSSMAMISGLSGRKSSTGSPTSPLNAEKLESEEDVSQAFLEAVAEEKPHVKPYFSKTIRDLEVVEGSAARFDCKIEGYPDPEVVWFKDDQSIRESRHFQIDYDEDGNCSLIISDVCGDDDAKYTCKAVNSLGEATCTAELIVETMEEGEGEGEEEEE

SEQ ID NO: 410 - protein, 460 aa, Homo sapiens
PMEGSASPPEKPRARPAAAVLCRGPVEPLVFLANFALVLQGPLTTQYLWHRFSADLGYNGTRQRGGCSNRSADPTMQEVETLTSHWTLYMNVGGFLVGLFSSTLLGAWSDSVGRRPLLVLASLGLLLQALVSVFVVQLQLHVGYFVLGRILCALLGDFGGLLAASFASVADVSSSRSRTFRMALLEASIGVAGMLASLLGGHWLRAQGYANPFWLALALLIAMTLYAAFCFGETLKEPKSTRLFTFRHHRSIVQLYVAPAPEKSRKHLALYSLAIFVVITVHFGAQDILTLYELSTPLCWDSKLIGYGSAAQHLPYLTSLLALKLLQYCLADAWVAEIGLAFNILGMVVFAFATITPLMFTGYGLLFLSLVITPVIRAKLSKLVRETEQGALFSAVACVNSLAMLTASGIFNSLYPATLNFMKGFPFLLGAGLLLIPAVLIGMLEKADPHLEFQQFPQSP

SEQ ID NO: 411 - protein, 873 aa, Homo sapiens
PMATACKRSGEPQSDDIEASRMKRAAAKHLIERYYHQLTEGCGNEACTNEFCASCPTFLRMDNNAAAIKALELYKINAKLCDPHPSKKGASSAYLENSKGAPNNSCSEIKMNKKGARIDFKDVTYLTEEKVYEILELCREREDYSPLIRVIGRVFSSAEALVQSFRKVKQHTKEELKSLQAKDEDKDEDEKEKAACSAAAMEEDSEASSSRIGDSSQGDNNLQKLGPDDVSVDIDAIRRVYTRLLSNEKIETAFLNALVYLSPNVECDLTYHNVYSRDPNYLNLFIIVMENRNLHSPEYLEMALPLFCKAMSKLPLAAQGKLIRLWSKYNADQIRRMMETFQQLITYKVISNEFNSRNLVNDDDAIVAASKCLKMVYYANVVGGEVDTNHNEEDDEEPIPESSELTLQELLGEERRNKKGPRVDPLETELGVKTLDCRKPLIPFEEFINEPLNEVLEMDKDYTFFKVETENKFSFMTCPFILNAVTKNLGLYYDNRIRMYSERRITVLYSLVQGQQLNPYLRLKVRRDHIIDDALVRLEMIAMENPADLKKQLYVEFEGEQGVDEGGVSKEFFQLVVEEIFNPDIGMFTYDESTKLFWFNPSSFETEGQFTLIGIVLGLAIYNNCILDVHFPMVVYRKLMGKKGTFRDLGDSHPVLYQSLKDLLEYEGNVEDDMMITFQISQTDLFGNPMMYDLKENGDKIPITNENRKEFVNLYSDYILNKSVEKQFKAFRRGFHMVTNESPLKYLFRPEEIELLICGSRNLDFQALEETTEYDGGYTRDSVLIREFWEIVHSFTDEQKRLFLQFTTGTDRAPVGGLGKLKMIIAKNGPDTERLPTSHTCFNVLLLPEYSSKEKLKERLLKAITYAKGFGML

SEQ ID NO: 412 - protein, 410 aa, Homo sapiens
PMQRLAMDLRMLSRELSLYLEHQVRVGFFGSGVGLSLILGFSVAYAFYYLSSIAKKPQLVTGGESFSRFLQDHCPVVTETYYPTVWCWEGRGQTLLRPFITSKPPVQYRNELIKTADGGQISLDWFDNDNSTCYMDASTRPTILLLPGLTGTSKESYILHMIHLSEELGYRCVVFNNRGVAGENLLTPRTYCCANTEDLETVIHHVHSLYPSAPFLAAGVSMGGMLLLNYLGKIGSKTPLMAAATFSVGWNTFACSESLEKPLNWLLFNYYLTTCLQSSVNKHRHMFVKQVDMDHVMKAKSIREFDKRFTSVMFGYQTIDDYYTDASPSPRLKSVGIPVLCLNSVDDVFSPSHAIPIETAKQNPNVALVLTSYGGHIGFLEGIWPRQSTYMDRVFKQFVQAMVEHGHELS

SEQ ID NO: 413 - protein, 161 aa, Homo sapiens
PMEIPVPVQPSWLRRASAPLPGLSAPGRLFDQRFGEGLLEAELAALCPTTLAPYYLRAPSVALPVAQVPTDPGHFSVLLDVKHFSPEEIAVKVVGEHVEVHARHEERPDEHGFVAREFHRRYRLPPGVDPAAVTSALSPEGVLSIQAAPASAQAPPPAAAK

SEQ ID NO: 414 - protein, 146 aa, Homo sapiens
PMLTRLVLSAHLSSTTSPPWTHAAISWELDNVLMPSPRIWPQVTPTGRSASVRSEGNTSSLWNFSAGQDVHAIVTRTCESVLSSAVYTHGCGCVRSATNITCQSSGQQRQAARQEEENSICKAHDSREGRLGYPLSAHQPGSGGPN

SEQ ID NO: 415 - protein, 459 aa, Homo sapiens
PMTKYPDNLSDSLFSGDEENAGTEEIKNEINGNWISASSINEARINAKAKRRLRKNSSRDSGRGDSVSDSGSDALRSGLTVPTSPKGRLLDRRSRSGKGRGLPKKGGAGGKGVWGTPGQVYDVEEVDVKDPNYDDDQENCVYETVVLPLDERAFEKTLTPIIQEYFEHGDTNEVAEMLRDLNLGEMKSGVPVLAVSLALEGKASHREMTSKLLSDLCGTVMSTTDVEKSFDKLLKDLPELALDTPRAPQLVGQFIARAVGDGILCNTYIDSYKGTVDCVQARAALDKATVLLSMSKGGKRKDSVWGSGGGQQSVNHLVKEIDMLLKEYLLSGDISEAEHCLKELEVPHFHHELVYEAIIMVLESTGESTFKMILDLLKSLWKSSTITVDQMKRGYERIYNEIPDINLDVPHSYSVLERFVEECFQAGIISKQLRDLCPSRGRKRFVSEGDGGRLKPESY

SEQ ID NO: 416 - protein, 264 aa, Homo sapiens
PMLQFVRAGARAWLRPTGSQGLSSLAEEAARATENPEQVASEGLPEPVLRKVELPVPTHRRPVQAWVESLRGFEQERVGLADLHPDVFATAPRLDILHQVAMWQKNFKRISYAKTKTRAEVRGGGRKPWPQKGTGRARHGSIRSPLWRGGGVAHGPRGPTSYYYMLPMKVRALGLKVALTVKLAQDDLHIMDSLELPTGDPQYLTELAHYRRWGDSVLLVDLTHEEMPQSIVEATSRLKTFNLIPAVGEQRAQAPRVRMCRLRC

SEQ ID NO: 417 - protein, 621 aa, Homo sapiens
PMAEARTSLSAHCRGPLATGLHPDLDLPGRSLATPAPSCYLLGSEPSSGLGLQPETHLPEGSLKRCCVLGLPPTSPASSSPCASSDVTSIIRSSQTSLVTCVNGLRSPPLAGDLGGPSKRARPGPASTDSHEGSLQLEACRKASFLKQEPADEFSELFGPHQQGLPPPYPLSQLPPGPSLGGLGLGLGGRVVAGRQACRWVDCCAAYEQQEELVRHIEKSHTDQRKGEDFTCFWAGCVRRYKPFNARYKLLIHMRVHSGEKPNKCMFEGCSKAFSRLENLKIHLRSHTGEKPYLCQHPGCQKAFSNSSDRAKHQRTHLDTKPYACQIPGCSKRYTDPSSLRKHVKAHSAKEQQVRKKLHAGPDTEADVLTECLVLQQLHTSTQLAASDGKGGCGLGQELLPGVYPGSITPHNGLASGLLPPAHDVPSRHHPLDATTSSHHHLSPLPMAESTRDGLGPGLLSPIVSPLKGLGPPPLPPSSQSHSPGGQPFPTLPSKPSYPPFQSPPPPPLPSPQGYQGSFHSIQSCFPYGDCYRMAEPAAGGDGLVGETHGFNPLRPNGYHSLSTPLPATGYEALAEASCPTALPQQPSEDVVSSGPEDCGFFPNGAFDHCLGHIPSIYTDT

SEQ ID NO: 418 - protein, 1750 aa, Homo sapiens
PMQAMDPAAADLYEEDGKDLDFYDFEPLPTLPEDEENVSLADILSLRDRGLSEQEAWAVCLECSLSMRSVAHAAIFQSLCITPDTLAFNTSGNVCFMEQLSDDPEGAFVPPEFDVTGNTFEAHIYSLGATLKAALEYVAEPTLEPRLSQDLEALLSRMQAEDPGDRPDLESIIALCEEKLQLTSSCRVCRSLSAVGRRVLSIESFGALQDVSESSWRERPAPGNAGPRRPPGDPSTDPEVLPTPEGPESETSRGPRASPTKALLSTPVRNGESHSREGLAGLVLDAERTLGELDRDALRRSRLRKVQTFPRLLSDSPEATLCLPLTRGKSQLPISELFSPDPRKAFLDRKNGLSSFQAQPKCRLWPEQEPEHQLGRVPCAGRSTDRGPGVPGSPGQPETSHPSQGPAEAPADPRDASGEAQTPRDDERIPEGARQLESAAAEQWVSLQDLLSQLGRPFREYELWALCLACLRALQTRPEHPAYLCLDSVLVAEDGAVLFQPPPANGSYDSFFLAPELAEERLVTEKASVYCVAAVLWTAAKFSVPRNHKLALPRRLKTLLLDMARRSAPERPSAAEAIKVCGSYLLQRGMDSRKILAHLRASICQVYQEEETISLQNAFSVVELKPSVAPAPEPSPGFLPVNSDTGLVAVPGPVPGQHPCGEEATQLPAAFTSEATHFKPIVLAQNASVARDQPALAQEESEERGGQREGEGEEKLSLEAHAGSPSLKTPDGPVPGPGPQGAAPEPLGASVQRDSAQGRPCPPPQAPANQPEGASSAAPGSPVPAPPTKASALPVEQGPAEPIPPGVASGGLRPDALGPTTAHHGPRHPPKPPRSKATERPGQEPEGPGATPAGERDDQSPDSVPERPRPADRRLCLPCVDASPLPGRTACPSLQEATRLIQEEFAFDGYLDNGLEALIMGEYIFALKDLTFATFCGAISEKFCDLYWDEKLLQNLFKVVNGQASPSPSTAEEAGSQLEGSQSPRSPSSKRPSLHRLGKEKPAMARTSSRAPCSPTSVSDVDSDALSRGNFEVGFRPQRSVKAERAQQPEAGEDRRPAGGASDVEAVTRLARSKGVGPALSPGPAGFQSCSPGWCSAFYEADCFGADVHNYVKDLGRQQADGALPDAQSPELEQQLMMEKRNYRKTLKFYQKLLQKEKRNKGSDVKTMLSKLKGQLEEMKSRVQFLSLVKKYLQVMYAERWGLEPCTLPVIVNIAAAPCDTLDFSPLDESSSLIFYNVNKHPGGRQKARILQAGTPLGLMTYLYSSDAFLEGYVQQFLYTFRYFCTPHDFLHFLLDRINSTLTRAHQDPTSTFTKIYRRSLCVLQAWVEDCYAVDFPRNSGLLGKLEDFISSKILPLDGSAKHLLGLLEVGMDRRAEGNPRGTDLENPREAEEDARPFNALCKRLSEDGISRKSFPWRLPRGNGLVLPPHKERPYTIAAALPKPCFLEDFYGPCAKTSEKGPYFLTEYSTHQLFSQLTLLQQELFQKCHPVHFLNSRALGVMDKSTAIPKASSSESLSAKTCSLFLPNYVQDKYLLQLLRNADDVSTWVAAEIVTSHTSKLQVNLLSKFLLIAKSCYEQRNFATAMQILSGLEHLAVRQSPAWRILPAKIAEVMEELKAVEVFLKSDSLCLMEGRRFRAQPTLPSAHLLAMHIQQLETGGFTMTNGAHRWSKLRNIAKVVSQVHAFQENPYTFSPDPKLQSYLKQRIARFSGADISTLAADSRANFHQVSSEKHSRKIQDKLRRMKATFQ

SEQ ID NO: 419 - protein, 208 aa, Homo sapiens
PMGIIRFLLLYCPTNILTVCVLERQIFDFLGYQWAPILANFVHIIIVILGLFGTIQYRPRYITGYAVWLVLWVTWNVFVICFYLEAGDLSKETDLILTFNISMHRSWWMENGPGCTVTSVTPAPDWAPEDHRYITVSGCLLEYQYIEVAHSSLQIVLALAGFIYACYVVKCITEEEDSFDFIGGFDSYGYQGPQKTSHLQLQPMYMSK

SEQ ID NO: 420 - protein, 307 aa, Homo sapiens
PMSQGSPGDWAPLDPTPGPPASPNPFVHELHLSRLQRVKFCLLGALLAPIRVLLAFIVLFLLWPFAWLQVAGLSEEQLQEPITGWRKTVCHNGVLGLSRLLFFLLGFLRIRVRGQRASRLQAPVLVAAPHSTFFDPIVLLPCDLPKVVSRAENLSVPVIGALLRFNQAILVSRHDPASRRRVVEEVRRRATSGGKWPQCYSFLRAPVPTRRLCLSSNQEPSSQGCLCSLSSSATPTVWTPPAGHGGVLEYSKSSGSQPLSPAALWMWSSFLCITPALRRAGTPPSMPTMFRGSWHRLWAFQPPNVSL

We claim:

1. A method for identifying a cell as neoplastic or predisposed to neoplasia, comprising:
detecting in a test cell epigenetic silencing of at least one gene listed in Table 5 wherein the test cell is selected from the group consisting of prostate, lung, breast, and colon cells;
identifying the test cell as neoplastic or predisposed to neoplasia.

2. The method of claim 1 wherein the cell is a prostate cell, and the at least one gene is selected from the group consisting of CD3D, APOC1, NBL1, ING4, LEF1, CENTD3, MGC15396, FKBP4, PLTP, TFAP2A, ATXN1, BMP2, ENPEP, MCAM, SSBP2, PDLIM3, PAK3, B4GALT1, and NDP.

3. The method of claim 1 wherein the cell is a prostate cell, and the at least one gene is selected from the group consisting of BMP2, ENPEP, MCAM, SSBP2, PAK3, B4GALT1, and NDP.

4. The method of claim 1 wherein the cell is a lung cell, and the at least one gene is selected from the group consisting of PHKA2, CBR3, CAMK4, HOXB5, ZNF198, RGS4, RBM15B, PDLIM3, PAK3, PIGH, TUBB4, B4GALT1, and NISCH.

5. The method of claim 1 wherein the cell is a lung cell, and the at least one gene is selected from the group consisting of PAK3, PIGH, TUBB4, B4GALT1, and NISCH.

6. The method of claim 1 wherein the cell is a breast cell, and the at least one gene is selected from the group consisting of BACH1, CKMT, GALE, HMG20B, KRT14, OGDHL, PON2, SESN1, KIF1A (kinesin family member 1A) PDLIM3 and MAL (T cell proliferation protein).

7. The method of claim 1 wherein the cell is a breast cell, and the at least one gene is selected from the group consisting of KIF1A (kinesin family member 1A) and MAL (T cell proliferation protein).

8. The method of claim 1 wherein the cell is a colon cell, and the at least one gene is selected from the group consisting of B4GALT1, C10orf119, C10orf13, CBR1, COPS4, COVA1, CSRP1, DARS, DNAJC10, FKBP14, FN3KRP, GANAB, HUS1, KLF11, MRPL4, MYLK, NELF, NETO2, PAPSS2, RBMS2, RHOB, SECTM1, SIRT2, SIRT7, SLC35D1, SLC9A3R1, TTRAP, TUBG2, FLJ20277, MYBL2, GPR116, OSMR, PC4, SLC39A4, UBE3A, PDLIM3, NRTK2, OGDHL, SFRP4, SSBP2, and UBE21.

9. The method of claim 1 wherein the cell is a colon cell, and the at least one gene is selected from the group consisting of GPR116, OSMR, PC4, SLC39A4, UBE3A, PDLIM3, NRTK2, OGDHL, SFRP4, SSBP2, and UBE21.

10. The method of claim 1 wherein epigenetic silencing of at least two genes is detected.

11. The method of claim 1 wherein epigenetic silencing is determined by measuring expression levels of at least one gene listed in Table 5.

12. The method of claim 1 wherein methylation of a CpG dinucleotide motif in the gene is detected.

13. The method of claim 12 wherein methylation is detected by contacting at least a portion of the gene with a methylation-sensitive restriction endonuclease, said endonuclease preferentially cleaving methylated recognition sites relative to non-methylated recognition sites, whereby cleavage of the portion of the gene indicates methylation of the portion of the gene.

14. The method of claim 12 wherein methylation is detected by contacting at least a portion of the gene with a methylation-sensitive restriction endonuclease, said endonuclease preferentially cleaving non-methylated recognition sites relative to methylated recognition sites, whereby cleavage of the portion of the gene indicates non-methylation of the portion of the gene provided that the gene comprises a recognition site for the methylation-sensitive restriction endonuclease.

15. The method of claim 12 wherein methylation is detected by:
contacting at least a portion of the gene of the test cell with a chemical reagent that selectively modifies a non-methylated cytosine residue relative to a methylated cytosine residue, or selectively modifies a methylated cytosine residue relative to a non-methylated cytosine residue; and
detecting a product generated due to said contacting.

16. The method of claim 15 wherein the step of detecting comprises amplification.

17. The method of claim 15 wherein the step of detecting comprises amplification with at least one primer that hybridizes to a sequence comprising a modified non-methylated CpG dinucleotide motif but not to a sequence comprising an unmodified methylated CpG dinucleotide motif thereby forming amplification products.

18. The method of claim 15 wherein the step of detecting comprises amplification with at least one primer that hybridizes to a sequence comprising an unmodified methylated CpG dinucleotide motif but not to a sequence comprising a modified non-methylated CpG dinucleotide motif thereby forming amplification products.

19. The method of claim 17 wherein the amplification products are detected using (a) a first oligonucleotide probe which hybridizes to a sequence comprising a modified non-methylated CpG dinucleotide motif but not to a sequence comprising an unmodified methylated CpG dinucleotide motif, (b) a second oligonucleotide probe that hybridizes to a sequence comprising an unmodified methylated CpG dinucleotide motif but not to sequence comprising a modified non-methylated CpG dinucleotide motif, or (c) both said first and second oligonucleotide probes.

20. The method of-claim 18 wherein the amplification products are detected using (a) a first oligonucleotide probe which hybridizes to a sequence comprising a modified non-methylated CpG dinucleotide motif but not to a sequence comprising an unmodified methylated CpG dinucleotide motif, (b) a second oligonucleotide probe that hybridizes to a sequence comprising an unmodified methylated CpG dinucleotide motif but not to sequence comprising a modified non-methylated CpG dinucleotide motif, or (c) both said first and second oligonucleotide probes.

21. The method of claim 15 wherein the product is detected by a method selected from the group consisting of hybridization, amplification, sequencing, electrophoresis, chromatography, and mass spectrometry

22. The method of claim 15 wherein the chemical reagent is hydrazine.

23. The method of claim 22 further comprising cleavage of the hydrazine-contacted at least a portion of the gene with piperidine.

24. The method of claim 15 wherein the chemical reagent comprises bisulfite ions.

25. The method of claim 24 further comprising treating the bisulfite ion-contacted at least a portion of the gene with alkali.

26. The method of claim 1 wherein the test cell is obtained from a surgical sample.

27. The method of claim 1 wherein the test cell is obtained from bone marrow, blood, serum, lymph, cerebrospinal fluid, saliva, sputum, stool, urine, or semen.

28. A method of reducing or inhibiting neoplastic growth of a prostate, lung, breast, or colon cell which exhibits epigenetic silenced transcription of at least one gene associated with a cancer, the method comprising:
restoring expression of a polypeptide encoded by the epigenetic silenced gene in the cell by contacting the cell with a CpG dinucleotide demethylating agent, wherein the gene is selected from those listed in Table 5, thereby reducing or inhibiting unregulated growth of the cell, with the proviso that if the cell is a breast or lung cell, the gene is not APC; and
testing expression of the gene in the cell to monitor response to the demethylating agent.

29. The method of claim 28 wherein the cell is a prostate cell, and the gene is selected from the group consisting of BMP2, ENPEP, MCAM, SSBP2, PAK3, B4GALT1, and NDP.

30. The method of claim 28 wherein the cell is a lung cell, and the gene is selected from the group consisting of PAK3, PIGH, TUBB4, B4GALT1, and NISCH.

31. The method of claim 28 wherein the cell is a breast cell, and the gene is selected from the group consisting of KIF1A (kinesin family member 1A) and MAL (T cell proliferation protein).

32. The method of claim 28 wherein the cell is a colon cell, and the gene is selected from the group consisting of GPR116, OSMR, PC4, SLC39A4, UBE3A, PDLIM3, NRTK2, OGDHL, SFRP4, SSBP2, and UBE21.

33. The method of claim 28 wherein the contacting is performed in vitro.

34. The method of claim 28 wherein the contacting is performed in vivo by administering the agent to a mammalian subject comprising the cell.

35. The method of claim 28 wherein the demethylating agent is selected from the group consisting of 5-aza-2′-deoxycytidine, 5-aza-cytidine, Zebularine, procaine, and L-ethionine.

36. A method of reducing or inhibiting neoplastic growth of a prostate, lung, breast, or colon cell which exhibits epigenetic silenced transcription of at least one gene associated with a cancer, the method comprising:
introducing a polynucleotide encoding a polypeptide into the cell which exhibits epigenetic silenced transcription of at least one gene listed in Table 5, wherein the polypeptide is encoded by said gene, wherein the polypeptide is expressed in the cell thereby restoring expression of the polypeptide in the cell, with the proviso that if the cell is a breast or lung cell, the gene is not APC.

37. The method of claim 36 wherein the cell is a prostate cell, a lung cell , a breast cell or a colon cell and the gene is selected from the group consisting of BMP2, ENPEP, MCAM, SSBP2, NDP, PAK3, B4GALT1, PIGH, TUBB4, NISCH, KIF1A (kinesin family member 1A), MAL (T cell proliferation protein), GPR116, OSMR, PC4, SLC39A4, UBE3A, PDLIM3, NRTK2, OGDHL, SFRP4, SSBP2, and UBE21.

38. A method of treating a prostate, lung, breast, or colon cancer patient, the method comprising:
administering a demethylating agent to the patient in sufficient amounts to restore expression of a tumor-associated methylation silenced gene selected from those listed in Table 5 in the patient's tumor, with the proviso that if the cell is a breast or lung cell, the gene is not APC; and
testing expression of the gene in cancer cells of the patient to monitor response to the demethylating agent.

39. The method of claim 38 wherein the cell is a prostate cell, a lung cell , a breast cell or a colon cell and the gene is selected from the group consisting of BMP2, ENPEP, MCAM, SSBP2, NDP, PAK3, B4GALT1, PIGH, TUBB4, NISCH. KIF1A (kinesin family member 1A), MAL (T cell proliferation protein), GPR116, OSMR, PC4, SLC39A4, UBE3A, PDLIM3, NRTK2, OGDHL, SFRP4, SSBP2, and UBE21.

40. A method of treating a prostate, lung, breast, or colon cancer patient, the method comprising:
administering to the patient a polynucleotide encoding a polypeptide, wherein the polypeptide is encoded by a gene listed in Table 5, wherein the polypeptide is expressed in the patient's tumor thereby restoring expression of the polypeptide in the tumor, with the proviso that if the cell is a breast or lung cell, the gene is not APC.

41. The method of claim 40 wherein the cell is a prostate cell, a lung cell , a breast cell or a colon cell and the gene is selected from the group consisting of BMP2, ENPEP, MCAM, SSBP2, NDP, PAK3, B4GALT1, NRTK2, OGDHL, SFRP4, SSBP2, PIGH, TUBB4, NISCH. KIF1A (kinesin family member 1A), MAL (T cell proliferation protein), GPR116, OSMR, PC4, SLC39A4, UBE3A, PDLIM3 and UBE21.

42. A method for selecting a therapeutic strategy for treating a prostate, lung, breast, or colon cancer patient, comprising:
identifying a gene selected from those listed in Table 5 whose expression in cancer cells of the patient is reactivated by a demethylating agent;
selecting a therapeutic agent which reactivates expression of the gene for treating said cancer patient, with the proviso that if the cancer cells are breast or lung cells, the gene is not APC.

43. The method of claim 42 wherein the therapeutic agent comprises a polynucleotide encoding the gene.

44. The method of claim 42 wherein the demethylating agent is 5-aza-2′-deoxycytidine.

45. The method of claim 42 wherein the therapeutic agent is 5-aza-2′-deoxycytidine.

46. The method of claim 42 wherein the cancer cells are selected from the group of cells consisting of lung, breast, colon, and prostate cells.

47. The method of claim 42 wherein the cancer cells are obtained from a surgical sample.

48. The method of claim 42 wherein the cancer cells are obtained from bone marrow, blood, serum, lymph, cerebrospinal fluid, saliva, sputum, stool, urine, or semen.

49. A kit for assessing methylation in a cell sample, comprising in a package:
a reagent that (a) modifies methylated cytosine residues but not non-methylated cytosine residues, or that (b); modifies non-methylated cytosine residues but not methylated cytosine residues; and
a pair of oligonucleotide primers that specifically hybridizes under amplification conditions to a region of a gene selected from those listed in Table 5, wherein the region is within about 1 kb of said gene's transcription start site.

50. The kit of claim 49 wherein the cell is a prostate cell, a lung cell, a breast cell or a colon cell and the gene is selected from the group consisting of BMP2, ENPEP, MCAM, SSBP2, NDP, PAK3, B4GALT1, PIGH, TUBB4, NISCH. KIF1A (kinesin family member 1A), MAL (T cell proliferation protein), GPR116, OSMR, PC4, SLC39A4, UBE3A, PDLIM3, NRTK2, OGDHL, SFRP4, SSBP2, and UBE21.

51. The kit of claim 49 wherein at least one of said pair of oligonucleotide primers hybridizes to a sequence comprising a modified non-methylated CpG dinucleotide motif but not to a sequence comprising an unmodified methylated CpG dinucleotide motif or wherein at least one of said pair of oligonucleotide primers hybridizes to a sequence comprising an unmodified methylated CpG dinucleotide motif but not to sequence comprising a modified non-methylated CpG dinucleotide motif.

52. The kit of claim 49 further comprising (a) a first oligonucleotide probe which hybridizes to a sequence comprising a modified non-methylated CpG dinucleotide motif but not to a sequence comprising an unmodified methylated CpG dinucleotide motif, (b) a second oligonucleotide probe that hybridizes to a sequence comprising an unmodified methylated CpG dinucleotide motif but not to sequence comprising a modified non-methylated CpG dinucleotide motif, or (c) both said first and second oligonucleotide probes.

53. The kit of claim 51 further comprising (a) a first oligonucleotide probe which hybridizes to a sequence comprising a modified non-methylated CpG dinucleotide motif but not to a sequence comprising an unmodified methylated CpG dinucleotide motif, (b) a second oligonucleotide probe that hybridizes to a sequence comprising an unmodified methylated CpG dinucleotide motif but not to sequence comprising a modified non-methylated CpG dinucleotide motif, or (c) both said first and second oligonucleotide probes.

54. The kit of claim 49 further comprising an oligonucleotide probe.

55. The kit of claim 49 further comprising a DNA polymerase for amplifying DNA.

56. A method to test compounds for their potential to treat cancer, comprising:
contacting the compound with a cancer cell selected from the group consisting of prostate, lung, breast, and colon cancer;
determining if expression of a gene selected from those listed in Table 5 is increased by the compound in the cell or if methylation of the gene is decreased by the compound in the cell.

57. The method of claim 56 wherein the cell is a prostate cell, a lung cell, a breast cell or a colon cell and the gene is selected from the group consisting of BMP2, ENPEP, MCAM, SSBP2, NDP, PAK3, B4GALT1,PIGH, TUBB4, NISCH. KIF1A (kinesin family member 1A), MAL (T cell proliferation protein), GPR116, OSMR, PC4, SLC39A4, UBE3A, PDLIM3, NRTK2, OGDHL, SFRP4, SSBP2, and UBE21.

58. A method to determine a prostate, lung, breast, or colon cancer patient's response to a chemotherapeutic agent, comprising:
treating the patient with the agent;
determining if expression of a gene selected from those listed in Table 5 is increased by the compound in cancer cells or if methylation of the gene is decreased by the compound in cancer cells.

59. The method of claim 58 wherein the cell is a prostate cell, a lung cell , a breast cell or a colon cell and the gene is selected from the group consisting of BMP2, ENPEP, MCAM, SSBP2, NDP, PAK3, B4GALT1,PIGH, TUBB4, NISCH, KIF1A (kinesin family member 1A), MAL (T cell proliferation protein), GPR116, OSMR, PC4, SLC39A4, UBE3A, PDLIM3, NRTK2, OGDHL, SFRP4, SSBP2, and UBE21.

60. A method of predicting a clinical response to treatment with doxorubicin of a subject in need thereof, comprising:
determining the state of methylation of a nucleic acid encoding CBR1 isolated from the subject,
wherein the state of methylation of the nucleic acid as compared with the state of methylation of the nucleic acid from a subject not in need of treatment is indicative of the level of CBR1; and
wherein CBR1 activates the anti-cancer activity of doxorubicin;
thereby predicting the clinical response to treatment of with doxorubicin.

61. A method of treating a cell proliferative disorder in a subject with an doxorubicin, comprising:
predicting a clinical response to treatment by determining the state of methylation of a nucleic acid isolated from the subject,
wherein the nucleic acid encodes CBR1 which activates the anti-cancer activity of doxorubicin; and
wherein the state of methylation of the nucleic acid as compared with the state of methylation of the nucleic acid from a subject not in need of treatment is indicative of the level of the CBR1.

62. The method of claim 60 or 61 further comprising the step of:
administering doxorubicin to the subject if a positive clinical response is predicted.

63. The method of claim 60 or 61 further comprising the step of:
administering the doxorubicin to the subject if the state of methylation of the nucleic acid is lower in the subject than in a subject not in need of treatment.
